United States Patent Application Publication US 2026/0275348 A1, published September 17, 2026 (application 18/996,459).

The application's sequence listing, which the Patent Office published only in electronic form, follows.

SEQUENCE LISTING (350 sequences)

SEQ ID NO: 1-30 - skipped (30 entries)

SEQ ID NO: 31 - RNA, 21 nt, Homo sapiens
  source 1..21: mol_type = mRNA
cgaccgtggcgagcttgagaa

SEQ ID NO: 32 - RNA, 21 nt, Homo sapiens
  source 1..21: mol_type = mRNA
cacgtactggtgctacattaa

SEQ ID NO: 33 - RNA, 21 nt, Homo sapiens
  source 1..21: mol_type = mRNA
ccaggagatccgcatgttgaa

SEQ ID NO: 34 - RNA, 21 nt, Homo sapiens
  source 1..21: mol_type = mRNA
ggagatccgcatgttgaagaa

SEQ ID NO: 35 - RNA, 21 nt, Homo sapiens
  source 1..21: mol_type = mRNA
tcctgcacgtacaacacagaa

SEQ ID NO: 36 - RNA, 21 nt, Homo sapiens
  source 1..21: mol_type = mRNA
cctcatcaacaggttcaacaa

SEQ ID NO: 37 - RNA, 21 nt, Homo sapiens
  source 1..21: mol_type = mRNA
ccgcttccagggtgaatggaa

SEQ ID NO: 38 - RNA, 21 nt, Homo sapiens
  source 1..21: mol_type = mRNA
aaggtcatctccacactggaa

SEQ ID NO: 39 - RNA, 17 nt, Homo sapiens
  source 1..17: mol_type = mRNA
cgtggcgagcttgagaa

SEQ ID NO: 40 - RNA, 17 nt, Homo sapiens
  source 1..17: mol_type = mRNA
tactggtgctacattaa

SEQ ID NO: 41 - RNA, 17 nt, Homo sapiens
  source 1..17: mol_type = mRNA
gagatccgcatgttgaa

SEQ ID NO: 42 - RNA, 17 nt, Homo sapiens
  source 1..17: mol_type = mRNA
atccgcatgttgaagaa

SEQ ID NO: 43 - RNA, 17 nt, Homo sapiens
  source 1..17: mol_type = mRNA
gcacgtacaacacagaa

SEQ ID NO: 44 - RNA, 17 nt, Homo sapiens
  source 1..17: mol_type = mRNA
atcaacaggttcaacaa

SEQ ID NO: 45 - RNA, 17 nt, Homo sapiens
  source 1..17: mol_type = mRNA
ttccagggtgaatggaa

SEQ ID NO: 46 - RNA, 17 nt, Homo sapiens
  source 1..17: mol_type = mRNA
tcatctccacactggaa

SEQ ID NO: 47 - RNA, 15 nt, Homo sapiens
  source 1..15: mol_type = mRNA
tggcgagcttgagaa

SEQ ID NO: 48 - RNA, 15 nt, Homo sapiens
  source 1..15: mol_type = mRNA
ctggtgctacattaa

SEQ ID NO: 49 - RNA, 15 nt, Homo sapiens
  source 1..15: mol_type = mRNA
gatccgcatgttgaa

SEQ ID NO: 50 - RNA, 15 nt, Homo sapiens
  source 1..15: mol_type = mRNA
ccgcatgttgaagaa

SEQ ID NO: 51 - RNA, 15 nt, Homo sapiens
  source 1..15: mol_type = mRNA
acgtacaacacagaa

SEQ ID NO: 52 - RNA, 15 nt, Homo sapiens
  source 1..15: mol_type = mRNA
caacaggttcaacaa

SEQ ID NO: 53 - RNA, 15 nt, Homo sapiens
  source 1..15: mol_type = mRNA
ccagggtgaatggaa

SEQ ID NO: 54 - RNA, 15 nt, Homo sapiens
  source 1..15: mol_type = mRNA
atctccacactggaa

SEQ ID NO: 55 - RNA, 21 nt, Homo sapiens
  source 1..21: mol_type = mRNA
ttctcaagctcgccacggtcg

SEQ ID NO: 56 - RNA, 21 nt, Homo sapiens
  source 1..21: mol_type = mRNA
ttaatgtagcaccagtacgtg

SEQ ID NO: 57 - RNA, 21 nt, Homo sapiens
  source 1..21: mol_type = mRNA
ttcaacatgcggatctcctgg

SEQ ID NO: 58 - RNA, 21 nt, Homo sapiens
  source 1..21: mol_type = mRNA
ttcttcaacatgcggatctcc

SEQ ID NO: 59 - RNA, 21 nt, Homo sapiens
  source 1..21: mol_type = mRNA
ttctgtgttgtacgtgcagga

SEQ ID NO: 60 - RNA, 21 nt, Homo sapiens
  source 1..21: mol_type = mRNA
ttgttgaacctgttgatgagg

SEQ ID NO: 61 - RNA, 21 nt, Homo sapiens
  source 1..21: mol_type = mRNA
ttccattcaccctggaagcgg

SEQ ID NO: 62 - RNA, 21 nt, Homo sapiens
  source 1..21: mol_type = mRNA
ttccagtgtggagatgacctt

SEQ ID NO: 63 - RNA, 21 nt, synthetic construct
  source 1..21: mol_type = other RNA
  modified_base 1: mod_base = OTHER; note = 2'-fluorocytidine-3'-phosphorothioate
  modified_base 2: mod_base = OTHER; note = 2'-O-methylguanosine-3'-phosphorothioate
  modified_base 3: mod_base = OTHER; note = 2'-fluoroadenosine-3'-phosphate
  modified_base 4: mod_base = OTHER; note = 2'-O-methylcytidine-3'-phosphate
  modified_base 5: mod_base = OTHER; note = 2'-fluorocytidine-3'-phosphate
  modified_base 6: mod_base = OTHER; note = 2'-O-methylguanosine-3'-phosphate
  modified_base 7: mod_base = OTHER; note = 2'-fluorouridine-3'-phosphate
  modified_base 8: mod_base = OTHER; note = 2'-O-methylguanosine-3'-phosphate
  modified_base 9: mod_base = OTHER; note = 2'-fluoroguanosine-3'-phosphate
  modified_base 10: mod_base = OTHER; note = 2'-O-methylcytidine-3'-phosphate
  modified_base 11: mod_base = OTHER; note = 2'-fluoroguanosine-3'-phosphate
  modified_base 12: mod_base = OTHER; note = 2'-O-methyladenosine-3'-phosphate
  modified_base 13: mod_base = OTHER; note = 2'-fluoroguanosine-3'-phosphate
  modified_base 14: mod_base = OTHER; note = 2'-O-methylcytidine-3'-phosphate
  modified_base 15: mod_base = OTHER; note = 2'-fluorouridine-3'-phosphate
  modified_base 16: mod_base = OTHER; note = 2'-O-methyluridine-3'-phosphate
  modified_base 17: mod_base = OTHER; note = 2'-fluoroguanosine-3'-phosphate
  modified_base 18: mod_base = OTHER; note = 2'-O-methyladenosine-3'-phosphate
  modified_base 19: mod_base = OTHER; note = 2'-fluoroguanosine-3'-phosphorothioate
  modified_base 20: mod_base = OTHER; note = 2'-O-methyladenosine-3'-phosphorothioate
  modified_base 21: mod_base = OTHER; note = 2'-fluoroadenosine-3'-phosphate
cgaccgtggcgagcttgagaa

SEQ ID NO: 64 - RNA, 21 nt, synthetic construct
  source 1..21: mol_type = other RNA
  modified_base 1: mod_base = OTHER; note = 2'-fluorocytidine-3'-phosphorothioate
  modified_base 2: mod_base = OTHER; note = 2'-O-methyladenosine-3'-phosphorothioate
  modified_base 3: mod_base = OTHER; note = 2'-fluorocytidine-3'-phosphate
  modified_base 4: mod_base = OTHER; note = 2'-O-methylguanosine-3'-phosphate
  modified_base 5: mod_base = OTHER; note = 2'-fluorouridine-3'-phosphate
  modified_base 6: mod_base = OTHER; note = 2'-O-methyladenosine-3'-phosphate
  modified_base 7: mod_base = OTHER; note = 2'-fluorocytidine-3'-phosphate
  modified_base 8: mod_base = OTHER; note = 2'-O-methyluridine-3'-phosphate
  modified_base 9: mod_base = OTHER; note = 2'-fluoroguanosine-3'-phosphate
  modified_base 10: mod_base = OTHER; note = 2'-O-methylguanosine-3'-phosphate
  modified_base 11: mod_base = OTHER; note = 2'-fluorouridine-3'-phosphate
  modified_base 12: mod_base = OTHER; note = 2'-O-methylguanosine-3'-phosphate
  modified_base 13: mod_base = OTHER; note = 2'-fluorocytidine-3'-phosphate
  modified_base 14: mod_base = OTHER; note = 2'-O-methyluridine-3'-phosphate
  modified_base 15: mod_base = OTHER; note = 2'-fluoroadenosine-3'-phosphate
  modified_base 16: mod_base = OTHER; note = 2'-O-methylcytidine-3'-phosphate
  modified_base 17: mod_base = OTHER; note = 2'-fluoroadenosine-3'-phosphate
  modified_base 18: mod_base = OTHER; note = 2'-O-methyluridine-3'-phosphate
  modified_base 19: mod_base = OTHER; note = 2'-fluorouridine-3'-phosphorothioate
  modified_base 20: mod_base = OTHER; note = 2'-O-methyladenosine-3'-phosphorothioate
  modified_base 21: mod_base = OTHER; note = 2'-fluoroadenosine-3'-phosphate
cacgtactggtgctacattaa

SEQ ID NO: 65 - RNA, 21 nt, synthetic construct
  source 1..21: mol_type = other RNA
  modified_base 1: mod_base = OTHER; note = 2'-fluorocytidine-3'-phosphorothioate
  modified_base 2: mod_base = OTHER; note = 2'-O-methylcytidine-3'-phosphorothioate
  modified_base 3: mod_base = OTHER; note = 2'-fluoroadenosine-3'-phosphate
  modified_base 4: mod_base = OTHER; note = 2'-O-methylguanosine-3'-phosphate
  modified_base 5: mod_base = OTHER; note = 2'-fluoroguanosine-3'-phosphate
  modified_base 6: mod_base = OTHER; note = 2'-O-methyladenosine-3'-phosphate
  modified_base 7: mod_base = OTHER; note = 2'-fluoroguanosine-3'-phosphate
  modified_base 8: mod_base = OTHER; note = 2'-O-methyladenosine-3'-phosphate
  modified_base 9: mod_base = OTHER; note = 2'-fluorouridine-3'-phosphate
  modified_base 10: mod_base = OTHER; note = 2'-O-methylcytidine-3'-phosphate
  modified_base 11: mod_base = OTHER; note = 2'-fluorocytidine-3'-phosphate
  modified_base 12: mod_base = OTHER; note = 2'-O-methylguanosine-3'-phosphate
  modified_base 13: mod_base = OTHER; note = 2'-fluorocytidine-3'-phosphate
  modified_base 14: mod_base = OTHER; note = 2'-O-methyladenosine-3'-phosphate
  modified_base 15: mod_base = OTHER; note = 2'-fluorouridine-3'-phosphate
  modified_base 16: mod_base = OTHER; note = 2'-O-methylguanosine-3'-phosphate
  modified_base 17: mod_base = OTHER; note = 2'-fluorouridine-3'-phosphate
  modified_base 18: mod_base = OTHER; note = 2'-O-methyluridine-3'-phosphate
  modified_base 19: mod_base = OTHER; note = 2'-fluoroguanosine-3'-phosphorothioate
  modified_base 20: mod_base = OTHER; note = 2'-O-methyladenosine-3'-phosphorothioate
  modified_base 21: mod_base = OTHER; note = 2'-fluoroadenosine-3'-phosphate
ccaggagatccgcatgttgaa

SEQ ID NO: 66 - RNA, 21 nt, synthetic construct
  source 1..21: mol_type = other RNA
  modified_base 1: mod_base = OTHER; note = 2'-fluoroguanosine-3'-phosphorothioate
  modified_base 2: mod_base = OTHER; note = 2'-O-methylguanosine-3'-phosphorothioate
  modified_base 3: mod_base = OTHER; note = 2'-fluoroadenosine-3'-phosphate
  modified_base 4: mod_base = OTHER; note = 2'-O-methylguanosine-3'-phosphate
  modified_base 5: mod_base = OTHER; note = 2'-fluoroadenosine-3'-phosphate
  modified_base 6: mod_base = OTHER; note = 2'-O-methyluridine-3'-phosphate
  modified_base 7: mod_base = OTHER; note = 2'-fluorocytidine-3'-phosphate
  modified_base 8: mod_base = OTHER; note = 2'-O-methylcytidine-3'-phosphate
  modified_base 9: mod_base = OTHER; note = 2'-fluoroguanosine-3'-phosphate
  modified_base 10: mod_base = OTHER; note = 2'-O-methylcytidine-3'-phosphate
  modified_base 11: mod_base = OTHER; note = 2'-fluoroadenosine-3'-phosphate
  modified_base 12: mod_base = OTHER; note = 2'-O-methyluridine-3'-phosphate
  modified_base 13: mod_base = OTHER; note = 2'-fluoroguanosine-3'-phosphate
  modified_base 14: mod_base = OTHER; note = 2'-O-methyluridine-3'-phosphate
  modified_base 15: mod_base = OTHER; note = 2'-fluorouridine-3'-phosphate
  modified_base 16: mod_base = OTHER; note = 2'-O-methylguanosine-3'-phosphate
  modified_base 17: mod_base = OTHER; note = 2'-fluoroadenosine-3'-phosphate
  modified_base 18: mod_base = OTHER; note = 2'-O-methyladenosine-3'-phosphate
  modified_base 19: mod_base = OTHER; note = 2'-fluoroguanosine-3'-phosphorothioate
  modified_base 20: mod_base = OTHER; note = 2'-O-methyladenosine-3'-phosphorothioate
  modified_base 21: mod_base = OTHER; note = 2'-fluoroadenosine-3'-phosphate
ggagatccgcatgttgaagaa

SEQ ID NO: 67 - RNA, 21 nt, synthetic construct
  source 1..21: mol_type = other RNA
  modified_base 1: mod_base = OTHER; note = 2'-fluorouridine-3'-phosphorothioate
  modified_base 2: mod_base = OTHER; note = 2'-O-methylcytidine-3'-phosphorothioate
  modified_base 3: mod_base = OTHER; note = 2'-fluorocytidine-3'-phosphate
  modified_base 4: mod_base = OTHER; note = 2'-O-methyluridine-3'-phosphate
  modified_base 5: mod_base = OTHER; note = 2'-fluoroguanosine-3'-phosphate
  modified_base 6: mod_base = OTHER; note = 2'-O-methylcytidine-3'-phosphate
  modified_base 7: mod_base = OTHER; note = 2'-fluoroadenosine-3'-phosphate
  modified_base 8: mod_base = OTHER; note = 2'-O-methylcytidine-3'-phosphate
  modified_base 9: mod_base = OTHER; note = 2'-fluoroguanosine-3'-phosphate
  modified_base 10: mod_base = OTHER; note = 2'-O-methyluridine-3'-phosphate
  modified_base 11: mod_base = OTHER; note = 2'-fluoroadenosine-3'-phosphate
  modified_base 12: mod_base = OTHER; note = 2'-O-methylcytidine-3'-phosphate
  modified_base 13: mod_base = OTHER; note = 2'-fluoroadenosine-3'-phosphate
  modified_base 14: mod_base = OTHER; note = 2'-O-methyladenosine-3'-phosphate
  modified_base 15: mod_base = OTHER; note = 2'-fluorocytidine-3'-phosphate
  modified_base 16: mod_base = OTHER; note = 2'-O-methyladenosine-3'-phosphate
  modified_base 17: mod_base = OTHER; note = 2'-fluorocytidine-3'-phosphate
  modified_base 18: mod_base = OTHER; note = 2'-O-methyladenosine-3'-phosphate
  modified_base 19: mod_base = OTHER; note = 2'-fluoroguanosine-3'-phosphorothioate
  modified_base 20: mod_base = OTHER; note = 2'-O-methyladenosine-3'-phosphorothioate
  modified_base 21: mod_base = OTHER; note = 2'-fluoroadenosine-3'-phosphate
tcctgcacgtacaacacagaa

SEQ ID NO: 68 - RNA, 21 nt, synthetic construct
  source 1..21: mol_type = other RNA
  modified_base 1: mod_base = OTHER; note = 2'-fluorocytidine-3'-phosphorothioate
  modified_base 2: mod_base = OTHER; note = 2'-O-methylcytidine-3'-phosphorothioate
  modified_base 3: mod_base = OTHER; note = 2'-fluorouridine-3'-phosphate
  modified_base 4: mod_base = OTHER; note = 2'-O-methylcytidine-3'-phosphate
  modified_base 5: mod_base = OTHER; note = 2'-fluoroadenosine-3'-phosphate
  modified_base 6: mod_base = OTHER; note = 2'-O-methyluridine-3'-phosphate
  modified_base 7: mod_base = OTHER; note = 2'-fluorocytidine-3'-phosphate
  modified_base 8: mod_base = OTHER; note = 2'-O-methyladenosine-3'-phosphate
  modified_base 9: mod_base = OTHER; note = 2'-fluoroadenosine-3'-phosphate
  modified_base 10: mod_base = OTHER; note = 2'-O-methylcytidine-3'-phosphate
  modified_base 11: mod_base = OTHER; note = 2'-fluoroadenosine-3'-phosphate
  modified_base 12: mod_base = OTHER; note = 2'-O-methylguanosine-3'-phosphate
  modified_base 13: mod_base = OTHER; note = 2'-fluoroguanosine-3'-phosphate
  modified_base 14: mod_base = OTHER; note = 2'-O-methyluridine-3'-phosphate
  modified_base 15: mod_base = OTHER; note = 2'-fluorouridine-3'-phosphate
  modified_base 16: mod_base = OTHER; note = 2'-O-methylcytidine-3'-phosphate
  modified_base 17: mod_base = OTHER; note = 2'-fluoroadenosine-3'-phosphate
  modified_base 18: mod_base = OTHER; note = 2'-O-methyladenosine-3'-phosphate
  modified_base 19: mod_base = OTHER; note = 2'-fluorocytidine-3'-phosphorothioate
  modified_base 20: mod_base = OTHER; note = 2'-O-methyladenosine-3'-phosphorothioate
  modified_base 21: mod_base = OTHER; note = 2'-fluoroadenosine-3'-phosphate
cctcatcaacaggttcaacaa

SEQ ID NO: 69 - RNA, 21 nt, synthetic construct
  source 1..21: mol_type = other RNA
  modified_base 1: mod_base = OTHER; note = 2'-fluorocytidine-3'-phosphorothioate
  modified_base 2: mod_base = OTHER; note = 2'-O-methylcytidine-3'-phosphorothioate
  modified_base 3: mod_base = OTHER; note = 2'-fluoroguanosine-3'-phosphate
  modified_base 4: mod_base = OTHER; note = 2'-O-methylcytidine-3'-phosphate
  modified_base 5: mod_base = OTHER; note = 2'-fluorouridine-3'-phosphate
  modified_base 6: mod_base = OTHER; note = 2'-O-methyluridine-3'-phosphate
  modified_base 7: mod_base = OTHER; note = 2'-fluorocytidine-3'-phosphate
  modified_base 8: mod_base = OTHER; note = 2'-O-methylcytidine-3'-phosphate
  modified_base 9: mod_base = OTHER; note = 2'-fluoroadenosine-3'-phosphate
  modified_base 10: mod_base = OTHER; note = 2'-O-methylguanosine-3'-phosphate
  modified_base 11: mod_base = OTHER; note = 2'-fluoroguanosine-3'-phosphate
  modified_base 12: mod_base = OTHER; note = 2'-O-methylguanosine-3'-phosphate
  modified_base 13: mod_base = OTHER; note = 2'-fluorouridine-3'-phosphate
  modified_base 14: mod_base = OTHER; note = 2'-O-methylguanosine-3'-phosphate
  modified_base 15: mod_base = OTHER; note = 2'-fluoroadenosine-3'-phosphate
  modified_base 16: mod_base = OTHER; note = 2'-O-methyladenosine-3'-phosphate
  modified_base 17: mod_base = OTHER; note = 2'-fluorouridine-3'-phosphate
  modified_base 18: mod_base = OTHER; note = 2'-O-methylguanosine-3'-phosphate
  modified_base 19: mod_base = OTHER; note = 2'-fluoroguanosine-3'-phosphorothioate
  modified_base 20: mod_base = OTHER; note = 2'-O-methyladenosine-3'-phosphorothioate
  modified_base 21: mod_base = OTHER; note = 2'-fluoroadenosine-3'-phosphate
ccgcttccagggtgaatggaa

SEQ ID NO: 70 - RNA, 21 nt, synthetic construct
  source 1..21: mol_type = other RNA
  modified_base 1: mod_base = OTHER; note = 2'-fluoroadenosine-3'-phosphorothioate
  modified_base 2: mod_base = OTHER; note = 2'-O-methyladenosine-3'-phosphorothioate
  modified_base 3: mod_base = OTHER; note = 2'-fluoroguanosine-3'-phosphate
  modified_base 4: mod_base = OTHER; note = 2'-O-methylguanosine-3'-phosphate
  modified_base 5: mod_base = OTHER; note = 2'-fluorouridine-3'-phosphate
  modified_base 6: mod_base = OTHER; note = 2'-O-methylcytidine-3'-phosphate
  modified_base 7: mod_base = OTHER; note = 2'-fluoroadenosine-3'-phosphate
  modified_base 8: mod_base = OTHER; note = 2'-O-methyluridine-3'-phosphate
  modified_base 9: mod_base = OTHER; note = 2'-fluorocytidine-3'-phosphate
  modified_base 10: mod_base = OTHER; note = 2'-O-methyluridine-3'-phosphate
  modified_base 11: mod_base = OTHER; note = 2'-fluorocytidine-3'-phosphate
  modified_base 12: mod_base = OTHER; note = 2'-O-methylcytidine-3'-phosphate
  modified_base 13: mod_base = OTHER; note = 2'-fluoroadenosine-3'-phosphate
  modified_base 14: mod_base = OTHER; note = 2'-O-methylcytidine-3'-phosphate
  modified_base 15: mod_base = OTHER; note = 2'-fluoroadenosine-3'-phosphate
  modified_base 16: mod_base = OTHER; note = 2'-O-methylcytidine-3'-phosphate
  modified_base 17: mod_base = OTHER; note = 2'-fluorouridine-3'-phosphate
  modified_base 18: mod_base = OTHER; note = 2'-O-methylguanosine-3'-phosphate
  modified_base 19: mod_base = OTHER; note = 2'-fluoroguanosine-3'-phosphorothioate
  modified_base 20: mod_base = OTHER; note = 2'-O-methyladenosine-3'-phosphorothioate
  modified_base 21: mod_base = OTHER; note = 2'-fluoroadenosine-3'-phosphate
aaggtcatctccacactggaa

SEQ ID NO: 71 - RNA, 17 nt, synthetic construct
  source 1..17: mol_type = other RNA
  modified_base 1: mod_base = OTHER; note = 2'-fluorocytidine-3'-phosphorothioate
  modified_base 2: mod_base = OTHER; note = 2'-O-methylguanosine-3'-phosphorothioate
  modified_base 3: mod_base = OTHER; note = 2'-fluorouridine-3'-phosphate
  modified_base 4: mod_base = OTHER; note = 2'-O-methylguanosine-3'-phosphate
  modified_base 5: mod_base = OTHER; note = 2'-fluoroguanosine-3'-phosphate
  modified_base 6: mod_base = OTHER; note = 2'-O-methylcytidine-3'-phosphate
  modified_base 7: mod_base = OTHER; note = 2'-fluoroguanosine-3'-phosphate
  modified_base 8: mod_base = OTHER; note = 2'-O-methyladenosine-3'-phosphate
  modified_base 9: mod_base = OTHER; note = 2'-fluoroguanosine-3'-phosphate
  modified_base 10: mod_base = OTHER; note = 2'-O-methylcytidine-3'-phosphate
  modified_base 11: mod_base = OTHER; note = 2'-fluorouridine-3'-phosphate
  modified_base 12: mod_base = OTHER; note = 2'-O-methyluridine-3'-phosphate
  modified_base 13: mod_base = OTHER; note = 2'-fluoroguanosine-3'-phosphate
  modified_base 14: mod_base = OTHER; note = 2'-O-methyladenosine-3'-phosphate
  modified_base 15: mod_base = OTHER; note = 2'-fluoroguanosine-3'-phosphorothioate
  modified_base 16: mod_base = OTHER; note = 2'-O-methyladenosine-3'-phosphorothioate
  modified_base 17: mod_base = OTHER; note = 2'-fluoroadenosine-3'-phosphate
cgtggcgagcttgagaa

SEQ ID NO: 72 - RNA, 17 nt, synthetic construct
  source 1..17: mol_type = other RNA
  modified_base 1: mod_base = OTHER; note = 2'-fluorouridine-3'-phosphorothioate
  modified_base 2: mod_base = OTHER; note = 2'-O-methyladenosine-3'-phosphorothioate
  modified_base 3: mod_base = OTHER; note = 2'-fluorocytidine-3'-phosphate
  modified_base 4: mod_base = OTHER; note = 2'-O-methyluridine-3'-phosphate
  modified_base 5: mod_base = OTHER; note = 2'-fluoroguanosine-3'-phosphate
  modified_base 6: mod_base = OTHER; note = 2'-O-methylguanosine-3'-phosphate
  modified_base 7: mod_base = OTHER; note = 2'-fluorouridine-3'-phosphate
  modified_base 8: mod_base = OTHER; note = 2'-O-methylguanosine-3'-phosphate
  modified_base 9: mod_base = OTHER; note = 2'-fluorocytidine-3'-phosphate
  modified_base 10: mod_base = OTHER; note = 2'-O-methyluridine-3'-phosphate
  modified_base 11: mod_base = OTHER; note = 2'-fluoroadenosine-3'-phosphate
  modified_base 12: mod_base = OTHER; note = 2'-O-methylcytidine-3'-phosphate
  modified_base 13: mod_base = OTHER; note = 2'-fluoroadenosine-3'-phosphate
  modified_base 14: mod_base = OTHER; note = 2'-O-methyluridine-3'-phosphate
  modified_base 15: mod_base = OTHER; note = 2'-fluorouridine-3'-phosphorothioate
  modified_base 16: mod_base = OTHER; note = 2'-O-methyladenosine-3'-phosphorothioate
  modified_base 17: mod_base = OTHER; note = 2'-fluoroadenosine-3'-phosphate
tactggtgctacattaa

SEQ ID NO: 73 - RNA, 17 nt, synthetic construct
  source 1..17: mol_type = other RNA
  modified_base 1: mod_base = OTHER; note = 2'-fluoroguanosine-3'-phosphorothioate
  modified_base 2: mod_base = OTHER; note = 2'-O-methyladenosine-3'-phosphorothioate
  modified_base 3: mod_base = OTHER; note = 2'-fluoroguanosine-3'-phosphate
  modified_base 4: mod_base = OTHER; note = 2'-O-methyladenosine-3'-phosphate
  modified_base 5: mod_base = OTHER; note = 2'-fluorouridine-3'-phosphate
  modified_base 6: mod_base = OTHER; note = 2'-O-methylcytidine-3'-phosphate
  modified_base 7: mod_base = OTHER; note = 2'-fluorocytidine-3'-phosphate
  modified_base 8: mod_base = OTHER; note = 2'-O-methylguanosine-3'-phosphate
  modified_base 9: mod_base = OTHER; note = 2'-fluorocytidine-3'-phosphate
  modified_base 10: mod_base = OTHER; note = 2'-O-methyladenosine-3'-phosphate
  modified_base 11: mod_base = OTHER; note = 2'-fluorouridine-3'-phosphate
  modified_base 12: mod_base = OTHER; note = 2'-O-methylguanosine-3'-phosphate
  modified_base 13: mod_base = OTHER; note = 2'-fluorouridine-3'-phosphate
  modified_base 14: mod_base = OTHER; note = 2'-O-methyluridine-3'-phosphate
  modified_base 15: mod_base = OTHER; note = 2'-fluoroguanosine-3'-phosphorothioate
  modified_base 16: mod_base = OTHER; note = 2'-O-methyladenosine-3'-phosphorothioate
  modified_base 17: mod_base = OTHER; note = 2'-fluoroadenosine-3'-phosphate
gagatccgcatgttgaa

SEQ ID NO: 74 - RNA, 17 nt, synthetic construct
  source 1..17: mol_type = other RNA
  modified_base 1: mod_base = OTHER; note = 2'-fluoroadenosine-3'-phosphorothioate
  modified_base 2: mod_base = OTHER; note = 2'-O-methyluridine-3'-phosphorothioate
  modified_base 3: mod_base = OTHER; note = 2'-fluorocytidine-3'-phosphate
  modified_base 4: mod_base = OTHER; note = 2'-O-methylcytidine-3'-phosphate
  modified_base 5: mod_base = OTHER; note = 2'-fluoroguanosine-3'-phosphate
  modified_base 6: mod_base = OTHER; note = 2'-O-methylcytidine-3'-phosphate
  modified_base 7: mod_base = OTHER; note = 2'-fluoroadenosine-3'-phosphate
  modified_base 8: mod_base = OTHER; note = 2'-O-methyluridine-3'-phosphate
  modified_base 9: mod_base = OTHER; note = 2'-fluoroguanosine-3'-phosphate
  modified_base 10: mod_base = OTHER; note = 2'-O-methyluridine-3'-phosphate
  modified_base 11: mod_base = OTHER; note = 2'-fluorouridine-3'-phosphate
  modified_base 12: mod_base = OTHER; note = 2'-O-methylguanosine-3'-phosphate
  modified_base 13: mod_base = OTHER; note = 2'-fluoroadenosine-3'-phosphate
  modified_base 14: mod_base = OTHER; note = 2'-O-methyladenosine-3'-phosphate
  modified_base 15: mod_base = OTHER; note = 2'-fluoroguanosine-3'-phosphorothioate
  modified_base 16: mod_base = OTHER; note = 2'-O-methyladenosine-3'-phosphorothioate
  modified_base 17: mod_base = OTHER; note = 2'-fluoroadenosine-3'-phosphate
atccgcatgttgaagaa

SEQ ID NO: 75 - RNA, 17 nt, synthetic construct
  source 1..17: mol_type = other RNA
  modified_base 1: mod_base = OTHER; note = 2'-fluoroguanosine-3'-phosphorothioate
  modified_base 2: mod_base = OTHER; note = 2'-O-methylcytidine-3'-phosphorothioate
  modified_base 3: mod_base = OTHER; note = 2'-fluoroadenosine-3'-phosphate
  modified_base 4: mod_base = OTHER; note = 2'-O-methylcytidine-3'-phosphate
  modified_base 5: mod_base = OTHER; note = 2'-fluoroguanosine-3'-phosphate
  modified_base 6: mod_base = OTHER; note = 2'-O-methyluridine-3'-phosphate
  modified_base 7: mod_base = OTHER; note = 2'-fluoroadenosine-3'-phosphate
  modified_base 8: mod_base = OTHER; note = 2'-O-methylcytidine-3'-phosphate
  modified_base 9: mod_base = OTHER; note = 2'-fluoroadenosine-3'-phosphate
  modified_base 10: mod_base = OTHER; note = 2'-O-methyladenosine-3'-phosphate
  modified_base 11: mod_base = OTHER; note = 2'-fluorocytidine-3'-phosphate
  modified_base 12: mod_base = OTHER; note = 2'-O-methyladenosine-3'-phosphate
  modified_base 13: mod_base = OTHER; note = 2'-fluorocytidine-3'-phosphate
  modified_base 14: mod_base = OTHER; note = 2'-O-methyladenosine-3'-phosphate
  modified_base 15: mod_base = OTHER; note = 2'-fluoroguanosine-3'-phosphorothioate
  modified_base 16: mod_base = OTHER; note = 2'-O-methyladenosine-3'-phosphorothioate
  modified_base 17: mod_base = OTHER; note = 2'-fluoroadenosine-3'-phosphate
gcacgtacaacacagaa

SEQ ID NO: 76 - RNA, 17 nt, synthetic construct
  source 1..17: mol_type = other RNA
  modified_base 1: mod_base = OTHER; note = 2'-fluoroadenosine-3'-phosphorothioate
  modified_base 2: mod_base = OTHER; note = 2'-O-methyluridine-3'-phosphorothioate
  modified_base 3: mod_base = OTHER; note = 2'-fluorocytidine-3'-phosphate
  modified_base 4: mod_base = OTHER; note = 2'-O-methyladenosine-3'-phosphate
  modified_base 5: mod_base = OTHER; note = 2'-fluoroadenosine-3'-phosphate
  modified_base 6: mod_base = OTHER; note = 2'-O-methylcytidine-3'-phosphate
  modified_base 7: mod_base = OTHER; note = 2'-fluoroadenosine-3'-phosphate
  modified_base 8: mod_base = OTHER; note = 2'-O-methylguanosine-3'-phosphate
  modified_base 9: mod_base = OTHER; note = 2'-fluoroguanosine-3'-phosphate
  modified_base 10: mod_base = OTHER; note = 2'-O-methyluridine-3'-phosphate
  modified_base 11: mod_base = OTHER; note = 2'-fluorouridine-3'-phosphate
  modified_base 12: mod_base = OTHER; note = 2'-O-methylcytidine-3'-phosphate
  modified_base 13: mod_base = OTHER; note = 2'-fluoroadenosine-3'-phosphate
  modified_base 14: mod_base = OTHER; note = 2'-O-methyladenosine-3'-phosphate
  modified_base 15: mod_base = OTHER; note = 2'-fluorocytidine-3'-phosphorothioate
  modified_base 16: mod_base = OTHER; note = 2'-O-methyladenosine-3'-phosphorothioate
  modified_base 17: mod_base = OTHER; note = 2'-fluoroadenosine-3'-phosphate
atcaacaggttcaacaa

SEQ ID NO: 77 - RNA, 17 nt, synthetic construct
  source 1..17: mol_type = other RNA
  modified_base 1: mod_base = OTHER; note = 2'-fluorouridine-3'-phosphorothioate
  modified_base 2: mod_base = OTHER; note = 2'-O-methyluridine-3'-phosphorothioate
  modified_base 3: mod_base = OTHER; note = 2'-fluorocytidine-3'-phosphate
  modified_base 4: mod_base = OTHER; note = 2'-O-methylcytidine-3'-phosphate
  modified_base 5: mod_base = OTHER; note = 2'-fluoroadenosine-3'-phosphate
  modified_base 6: mod_base = OTHER; note = 2'-O-methylguanosine-3'-phosphate
  modified_base 7: mod_base = OTHER; note = 2'-fluoroguanosine-3'-phosphate
  modified_base 8: mod_base = OTHER; note = 2'-O-methylguanosine-3'-phosphate
  modified_base 9: mod_base = OTHER; note = 2'-fluorouridine-3'-phosphate
  modified_base 10: mod_base = OTHER; note = 2'-O-methylguanosine-3'-phosphate
  modified_base 11: mod_base = OTHER; note = 2'-fluoroadenosine-3'-phosphate
  modified_base 12: mod_base = OTHER; note = 2'-O-methyladenosine-3'-phosphate
  modified_base 13: mod_base = OTHER; note = 2'-fluorouridine-3'-phosphate
  modified_base 14: mod_base = OTHER; note = 2'-O-methylguanosine-3'-phosphate
  modified_base 15: mod_base = OTHER; note = 2'-fluoroguanosine-3'-phosphorothioate
  modified_base 16: mod_base = OTHER; note = 2'-O-methyladenosine-3'-phosphorothioate
  modified_base 17: mod_base = OTHER; note = 2'-fluoroadenosine-3'-phosphate
ttccagggtgaatggaa

SEQ ID NO: 78 - RNA, 17 nt, synthetic construct
  source 1..17: mol_type = other RNA
  modified_base 1: mod_base = OTHER; note = 2'-fluorouridine-3'-phosphorothioate
  modified_base 2: mod_base = OTHER; note = 2'-O-methylcytidine-3'-phosphorothioate
  modified_base 3: mod_base = OTHER; note = 2'-fluoroadenosine-3'-phosphate
  modified_base 4: mod_base = OTHER; note = 2'-O-methyluridine-3'-phosphate
  modified_base 5: mod_base = OTHER; note = 2'-fluorocytidine-3'-phosphate
  modified_base 6: mod_base = OTHER; note = 2'-O-methyluridine-3'-phosphate
  modified_base 7: mod_base = OTHER; note = 2'-fluorocytidine-3'-phosphate
  modified_base 8: mod_base = OTHER; note = 2'-O-methylcytidine-3'-phosphate
  modified_base 9: mod_base = OTHER; note = 2'-fluoroadenosine-3'-phosphate
  modified_base 10: mod_base = OTHER; note = 2'-O-methylcytidine-3'-phosphate
  modified_base 11: mod_base = OTHER; note = 2'-fluoroadenosine-3'-phosphate
  modified_base 12: mod_base = OTHER; note = 2'-O-methylcytidine-3'-phosphate
  modified_base 13: mod_base = OTHER; note = 2'-fluorouridine-3'-phosphate
  modified_base 14: mod_base = OTHER; note = 2'-O-methylguanosine-3'-phosphate
  modified_base 15: mod_base = OTHER; note = 2'-fluoroguanosine-3'-phosphorothioate
  modified_base 16: mod_base = OTHER; note = 2'-O-methyladenosine-3'-phosphorothioate
  modified_base 17: mod_base = OTHER; note = 2'-fluoroadenosine-3'-phosphate
tcatctccacactggaa

SEQ ID NO: 79 - RNA, 15 nt, synthetic construct
  source 1..15: mol_type = other RNA
  modified_base 1: mod_base = OTHER; note = 2'-fluorouridine-3'-phosphorothioate
  modified_base 2: mod_base = OTHER; note = 2'-O-methylguanosine-3'-phosphorothioate
  modified_base 3: mod_base = OTHER; note = 2'-fluoroguanosine-3'-phosphate
  modified_base 4: mod_base = OTHER; note = 2'-O-methylcytidine-3'-phosphate
  modified_base 5: mod_base = OTHER; note = 2'-fluoroguanosine-3'-phosphate
  modified_base 6: mod_base = OTHER; note = 2'-O-methyladenosine-3'-phosphate
  modified_base 7: mod_base = OTHER; note = 2'-fluoroguanosine-3'-phosphate
  modified_base 8: mod_base = OTHER; note = 2'-O-methylcytidine-3'-phosphate
  modified_base 9: mod_base = OTHER; note = 2'-fluorouridine-3'-phosphate
  modified_base 10: mod_base = OTHER; note = 2'-O-methyluridine-3'-phosphate
  modified_base 11: mod_base = OTHER; note = 2'-fluoroguanosine-3'-phosphate
  modified_base 12: mod_base = OTHER; note = 2'-O-methyladenosine-3'-phosphate
  modified_base 13: mod_base = OTHER; note = 2'-fluoroguanosine-3'-phosphorothioate
  modified_base 14: mod_base = OTHER; note = 2'-O-methyladenosine-3'-phosphorothioate
  modified_base 15: mod_base = OTHER; note = 2'-fluoroadenosine-3'-phosphate
tggcgagcttgagaa

SEQ ID NO: 80 - RNA, 15 nt, synthetic construct
  source 1..15: mol_type = other RNA
  modified_base 1: mod_base = OTHER; note = 2'-fluorocytidine-3'-phosphorothioate
  modified_base 2: mod_base = OTHER; note = 2'-O-methyluridine-3'-phosphorothioate
  modified_base 3: mod_base = OTHER; note = 2'-fluoroguanosine-3'-phosphate
  modified_base 4: mod_base = OTHER; note = 2'-O-methylguanosine-3'-phosphate
  modified_base 5: mod_base = OTHER; note = 2'-fluorouridine-3'-phosphate
  modified_base 6: mod_base = OTHER; note = 2'-O-methylguanosine-3'-phosphate
  modified_base 7: mod_base = OTHER; note = 2'-fluorocytidine-3'-phosphate
  modified_base 8: mod_base = OTHER; note = 2'-O-methyluridine-3'-phosphate
  modified_base 9: mod_base = OTHER; note = 2'-fluoroadenosine-3'-phosphate
  modified_base 10: mod_base = OTHER; note = 2'-O-methylcytidine-3'-phosphate
  modified_base 11: mod_base = OTHER; note = 2'-fluoroadenosine-3'-phosphate
  modified_base 12: mod_base = OTHER; note = 2'-O-methyluridine-3'-phosphate
  modified_base 13: mod_base = OTHER; note = 2'-fluorouridine-3'-phosphorothioate
  modified_base 14: mod_base = OTHER; note = 2'-O-methyladenosine-3'-phosphorothioate
  modified_base 15: mod_base = OTHER; note = 2'-fluoroadenosine-3'-phosphate
ctggtgctacattaa

SEQ ID NO: 81 - RNA, 15 nt, synthetic construct
  source 1..15: mol_type = other RNA
  modified_base 1: mod_base = OTHER; note = 2'-fluoroguanosine-3'-phosphorothioate
  modified_base 2: mod_base = OTHER; note = 2'-O-methyladenosine-3'-phosphorothioate
  modified_base 3: mod_base = OTHER; note = 2'-fluorouridine-3'-phosphate
  modified_base 4: mod_base = OTHER; note = 2'-O-methylcytidine-3'-phosphate
  modified_base 5: mod_base = OTHER; note = 2'-fluorocytidine-3'-phosphate
  modified_base 6: mod_base = OTHER; note = 2'-O-methylguanosine-3'-phosphate
  modified_base 7: mod_base = OTHER; note = 2'-fluorocytidine-3'-phosphate
  modified_base 8: mod_base = OTHER; note = 2'-O-methyladenosine-3'-phosphate
  modified_base 9: mod_base = OTHER; note = 2'-fluorouridine-3'-phosphate
  modified_base 10: mod_base = OTHER; note = 2'-O-methylguanosine-3'-phosphate
  modified_base 11: mod_base = OTHER; note = 2'-fluorouridine-3'-phosphate
  modified_base 12: mod_base = OTHER; note = 2'-O-methyluridine-3'-phosphate
  modified_base 13: mod_base = OTHER; note = 2'-fluoroguanosine-3'-phosphorothioate
  modified_base 14: mod_base = OTHER; note = 2'-O-methyladenosine-3'-phosphorothioate
  modified_base 15: mod_base = OTHER; note = 2'-fluoroadenosine-3'-phosphate
gatccgcatgttgaa

SEQ ID NO: 82 - RNA, 15 nt, synthetic construct
  source 1..15: mol_type = other RNA
  modified_base 1: mod_base = OTHER; note = 2'-fluorocytidine-3'-phosphorothioate
  modified_base 2: mod_base = OTHER; note = 2'-O-methylcytidine-3'-phosphorothioate
  modified_base 3: mod_base = OTHER; note = 2'-fluoroguanosine-3'-phosphate
  modified_base 4: mod_base = OTHER; note = 2'-O-methylcytidine-3'-phosphate
  modified_base 5: mod_base = OTHER; note = 2'-fluoroadenosine-3'-phosphate
  modified_base 6: mod_base = OTHER; note = 2'-O-methyluridine-3'-phosphate
  modified_base 7: mod_base = OTHER; note = 2'-fluoroguanosine-3'-phosphate
  modified_base 8: mod_base = OTHER; note = 2'-O-methyluridine-3'-phosphate
  modified_base 9: mod_base = OTHER; note = 2'-fluorouridine-3'-phosphate
  modified_base 10: mod_base = OTHER; note = 2'-O-methylguanosine-3'-phosphate
  modified_base 11: mod_base = OTHER; note = 2'-fluoroadenosine-3'-phosphate
  modified_base 12: mod_base = OTHER; note = 2'-O-methyladenosine-3'-phosphorothioate
  modified_base 13: mod_base = OTHER; note = 2'-fluoroguanosine-3'-phosphorothioate
  modified_base 14: mod_base = OTHER; note = 2'-O-methyladenosine-3'-phosphate
  modified_base 15: mod_base = OTHER; note = 2'-fluoroadenosine-3'-phosphate
ccgcatgttgaagaa

SEQ ID NO: 83 - RNA, 15 nt, synthetic construct
  source 1..15: mol_type = other RNA
  modified_base 1: mod_base = OTHER; note = 2'-fluoroadenosine-3'-phosphorothioate
  modified_base 2: mod_base = OTHER; note = 2'-O-methylcytidine-3'-phosphorothioate
  modified_base 3: mod_base = OTHER; note = 2'-fluoroguanosine-3'-phosphate
  modified_base 4: mod_base = OTHER; note = 2'-O-methyluridine-3'-phosphate
  modified_base 5: mod_base = OTHER; note = 2'-fluoroadenosine-3'-phosphate
  modified_base 6: mod_base = OTHER; note = 2'-O-methylcytidine-3'-phosphate
  modified_base 7: mod_base = OTHER; note = 2'-fluoroadenosine-3'-phosphate
  modified_base 8: mod_base = OTHER; note = 2'-O-methyladenosine-3'-phosphate
  modified_base 9: mod_base = OTHER; note = 2'-fluorocytidine-3'-phosphate
  modified_base 10: mod_base = OTHER; note = 2'-O-methyladenosine-3'-phosphate
  modified_base 11: mod_base = OTHER; note = 2'-fluorocytidine-3'-phosphate
  modified_base 12: mod_base = OTHER; note = 2'-O-methyladenosine-3'-phosphate
  modified_base 13: mod_base = OTHER; note = 2'-fluoroguanosine-3'-phosphorothioate
  modified_base 14: mod_base = OTHER; note = 2'-O-methyladenosine-3'-phosphorothioate
  modified_base 15: mod_base = OTHER; note = 2'-fluoroadenosine-3'-phosphate
acgtacaacacagaa

SEQ ID NO: 84 - RNA, 15 nt, synthetic construct
  source 1..15: mol_type = other RNA
  modified_base 1: mod_base = OTHER; note = 2'-fluorocytidine-3'-phosphorothioate
  modified_base 2: mod_base = OTHER; note = 2'-O-methyladenosine-3'-phosphorothioate
  modified_base 3: mod_base = OTHER; note = 2'-fluoroadenosine-3'-phosphate
  modified_base 4: mod_base = OTHER; note = 2'-O-methylcytidine-3'-phosphate
  modified_base 5: mod_base = OTHER; note = 2'-fluoroadenosine-3'-phosphate
  modified_base 6: mod_base = OTHER; note = 2'-O-methylguanosine-3'-phosphate
  modified_base 7: mod_base = OTHER; note = 2'-fluoroguanosine-3'-phosphate
  modified_base 8: mod_base = OTHER; note = 2'-O-methyluridine-3'-phosphate
  modified_base 9: mod_base = OTHER; note = 2'-fluorouridine-3'-phosphate
  modified_base 10: mod_base = OTHER; note = 2'-O-methylcytidine-3'-phosphate
  modified_base 11: mod_base = OTHER; note = 2'-fluoroadenosine-3'-phosphate
  modified_base 12: mod_base = OTHER; note = 2'-O-methyladenosine-3'-phosphate
  modified_base 13: mod_base = OTHER; note = 2'-fluorocytidine-3'-phosphorothioate
  modified_base 14: mod_base = OTHER; note = 2'-O-methyladenosine-3'-phosphorothioate
  modified_base 15: mod_base = OTHER; note = 2'-fluoroadenosine-3'-phosphate
caacaggttcaacaa

SEQ ID NO: 85 - RNA, 15 nt, synthetic construct
  source 1..15: mol_type = other RNA
  modified_base 1: mod_base = OTHER; note = 2'-fluorocytidine-3'-phosphorothioate
  modified_base 2: mod_base = OTHER; note = 2'-O-methylcytidine-3'-phosphorothioate
  modified_base 3: mod_base = OTHER; note = 2'-fluoroadenosine-3'-phosphate
  modified_base 4: mod_base = OTHER; note = 2'-O-methylguanosine-3'-phosphate
  modified_base 5: mod_base = OTHER; note = 2'-fluoroguanosine-3'-phosphate
  modified_base 6: mod_base = OTHER; note = 2'-O-methylguanosine-3'-phosphate
  modified_base 7: mod_base = OTHER; note = 2'-fluorouridine-3'-phosphate
  modified_base 8: mod_base = OTHER; note = 2'-O-methylguanosine-3'-phosphate
  modified_base 9: mod_base = OTHER; note = 2'-fluoroadenosine-3'-phosphate
  modified_base 10: mod_base = OTHER; note = 2'-O-methyladenosine-3'-phosphate
  modified_base 11: mod_base = OTHER; note = 2'-fluorouridine-3'-phosphate
  modified_base 12: mod_base = OTHER; note = 2'-O-methylguanosine-3'-phosphate
  modified_base 13: mod_base = OTHER; note = 2'-fluoroguanosine-3'-phosphorothioate
  modified_base 14: mod_base = OTHER; note = 2'-O-methyladenosine-3'-phosphorothioate
  modified_base 15: mod_base = OTHER; note = 2'-fluoroadenosine-3'-phosphate
ccagggtgaatggaa

SEQ ID NO: 86 - RNA, 15 nt, synthetic construct
  source 1..15: mol_type = other RNA
  modified_base 1: mod_base = OTHER; note = 2'-fluoroadenosine-3'-phosphorothioate
  modified_base 2: mod_base = OTHER; note = 2'-O-methyluridine-3'-phosphorothioate
  modified_base 3: mod_base = OTHER; note = 2'-fluorocytidine-3'-phosphate
  modified_base 4: mod_base = OTHER; note = 2'-O-methyluridine-3'-phosphate
  modified_base 5: mod_base = OTHER; note = 2'-fluorocytidine-3'-phosphate
  modified_base 6: mod_base = OTHER; note = 2'-O-methylcytidine-3'-phosphate
  modified_base 7: mod_base = OTHER; note = 2'-fluoroadenosine-3'-phosphate
  modified_base 8: mod_base = OTHER; note = 2'-O-methylcytidine-3'-phosphate
  modified_base 9: mod_base = OTHER; note = 2'-fluoroadenosine-3'-phosphate
  modified_base 10: mod_base = OTHER; note = 2'-O-methylcytidine-3'-phosphate
  modified_base 11: mod_base = OTHER; note = 2'-fluorouridine-3'-phosphate
  modified_base 12: mod_base = OTHER; note = 2'-O-methylguanosine-3'-phosphate
  modified_base 13: mod_base = OTHER; note = 2'-fluoroguanosine-3'-phosphorothioate
  modified_base 14: mod_base = OTHER; note = 2'-O-methyladenosine-3'-phosphorothioate
  modified_base 15: mod_base = OTHER; note = 2'-fluoroadenosine-3'-phosphate
atctccacactggaa

SEQ ID NO: 87 - RNA, 21 nt, synthetic construct
  source 1..21: mol_type = other RNA
  modified_base 1: mod_base = OTHER; note = 2'-O-methyluridine-3'-phosphorothioate
  modified_base 2: mod_base = OTHER; note = 2'-fluorouridine-3'-phosphorothioate
  modified_base 3: mod_base = OTHER; note = 2'-O-methylcytidine-3'-phosphate
  modified_base 4: mod_base = OTHER; note = 2'-fluorouridine-3'-phosphate
  modified_base 5: mod_base = OTHER; note = 2'-O-methylcytidine-3'-phosphate
  modified_base 6: mod_base = OTHER; note = 2'-fluoroadenosine-3'-phosphate
  modified_base 7: mod_base = OTHER; note = 2'-O-methyladenosine-3'-phosphate
  modified_base 8: mod_base = OTHER; note = 2'-fluoroguanosine-3'-phosphate
  modified_base 9: mod_base = OTHER; note = 2'-O-methylcytidine-3'-phosphate
  modified_base 10: mod_base = OTHER; note = 2'-fluorouridine-3'-phosphate
  modified_base 11: mod_base = OTHER; note = 2'-O-methylcytidine-3'-phosphate
  modified_base 12: mod_base = OTHER; note = 2'-fluoroguanosine-3'-phosphate
  modified_base 13: mod_base = OTHER; note = 2'-O-methylcytidine-3'-phosphate
  modified_base 14: mod_base = OTHER; note = 2'-fluorocytidine-3'-phosphorothioate
  modified_base 15: mod_base = OTHER; note = 2'-O-methyladenosine-3'-phosphorothioate
  modified_base 16: mod_base = OTHER; note = 2'-fluorocytidine-3'-phosphorothioate
  modified_base 17: mod_base = OTHER; note = 2'-O-methylguanosine-3'-phosphorothioate
  modified_base 18: mod_base = OTHER; note = 2'-fluoroguanosine-3'-phosphorothioate
  modified_base 19: mod_base = OTHER; note = 2'-O-methyluridine-3'-phosphorothioate
  modified_base 20: mod_base = OTHER; note = 2'-O-methylcytidine-3'-phosphorothioate
  modified_base 21: mod_base = OTHER; note = 2'-fluoroguanosine-3'-phosphate
ttctcaagctcgccacggtcg

SEQ ID NO: 88 - RNA, 21 nt, synthetic construct
  source 1..21: mol_type = other RNA
  modified_base 1: mod_base = OTHER; note = 2'-O-methyluridine-3'-phosphorothioate
  modified_base 2: mod_base = OTHER; note = 2'-fluorouridine-3'-phosphorothioate
  modified_base 3: mod_base = OTHER; note = 2'-O-methyladenosine-3'-phosphate
  modified_base 4: mod_base = OTHER; note = 2'-fluoroadenosine-3'-phosphate
  modified_base 5: mod_base = OTHER; note = 2'-O-methyluridine-3'-phosphate
  modified_base 6: mod_base = OTHER; note = 2'-fluoroguanosine-3'-phosphate
  modified_base 7: mod_base = OTHER; note = 2'-O-methyluridine-3'-phosphate
  modified_base 8: mod_base = OTHER; note = 2'-fluoroadenosine-3'-phosphate
  modified_base 9: mod_base = OTHER; note = 2'-O-methylguanosine-3'-phosphate
  modified_base 10: mod_base = OTHER; note = 2'-fluorocytidine-3'-phosphate
  modified_base 11: mod_base = OTHER; note = 2'-O-methyladenosine-3'-phosphate
  modified_base 12: mod_base = OTHER; note = 2'-fluorocytidine-3'-phosphate
  modified_base 13: mod_base = OTHER; note = 2'-O-methylcytidine-3'-phosphate
  modified_base 14: mod_base = OTHER; note = 2'-fluoroadenosine-3'-phosphorothioate
  modified_base 15: mod_base = OTHER; note = 2'-O-methylguanosine-3'-phosphorothioate
  modified_base 16: mod_base = OTHER; note = 2'-fluorouridine-3'-phosphorothioate
  modified_base 17: mod_base = OTHER; note = 2'-O-methyladenosine-3'-phosphorothioate
  modified_base 18: mod_base = OTHER; note = 2'-fluorocytidine-3'-phosphorothioate
  modified_base 19: mod_base = OTHER; note = 2'-O-methylguanosine-3'-phosphorothioate
  modified_base 20: mod_base = OTHER; note = 2'-O-methyluridine-3'-phosphorothioate
  modified_base 21: mod_base = OTHER; note = 2'-fluoroguanosine-3'-phosphate
ttaatgtagcaccagtacgtg

SEQ ID NO: 89 - RNA, 21 nt, synthetic construct
  source 1..21: mol_type = other RNA
  modified_base 1: mod_base = OTHER; note = 2'-O-methyluridine-3'-phosphorothioate
  modified_base 2: mod_base = OTHER; note = 2'-fluorouridine-3'-phosphorothioate
  modified_base 3: mod_base = OTHER; note = 2'-O-methylcytidine-3'-phosphate
  modified_base 4: mod_base = OTHER; note = 2'-fluoroadenosine-3'-phosphate
  modified_base 5: mod_base = OTHER; note = 2'-O-methyladenosine-3'-phosphate
  modified_base 6: mod_base = OTHER; note = 2'-fluorocytidine-3'-phosphate
  modified_base 7: mod_base = OTHER; note = 2'-O-methyladenosine-3'-phosphate
  modified_base 8: mod_base = OTHER; note = 2'-fluorouridine-3'-phosphate
  modified_base 9: mod_base = OTHER; note = 2'-O-methylguanosine-3'-phosphate
  modified_base 10: mod_base = OTHER; note = 2'-fluorocytidine-3'-phosphate
  modified_base 11: mod_base = OTHER; note = 2'-O-methylguanosine-3'-phosphate
  modified_base 12: mod_base = OTHER; note = 2'-fluoroguanosine-3'-phosphate
  modified_base 13: mod_base = OTHER; note = 2'-O-methyladenosine-3'-phosphate
  modified_base 14: mod_base = OTHER; note = 2'-fluorouridine-3'-phosphorothioate
  modified_base 15: mod_base = OTHER; note = 2'-O-methylcytidine-3'-phosphorothioate
  modified_base 16: mod_base = OTHER; note = 2'-fluorouridine-3'-phosphorothioate
  modified_base 17: mod_base = OTHER; note = 2'-O-methylcytidine-3'-phosphorothioate
  modified_base 18: mod_base = OTHER; note = 2'-fluorocytidine-3'-phosphorothioate
  modified_base 19: mod_base = OTHER; note = 2'-O-methyluridine-3'-phosphorothioate
  modified_base 20: mod_base = OTHER; note = 2'-O-methylguanosine-3'-phosphorothioate
  modified_base 21: mod_base = OTHER; note = 2'-fluoroguanosine-3'-phosphate
ttcaacatgcggatctcctgg

SEQ ID NO: 90 - RNA, 21 nt, synthetic construct
  source 1..21: mol_type = other RNA
  modified_base 1: mod_base = OTHER; note = 2'-O-methyluridine-3'-phosphorothioate
  modified_base 2: mod_base = OTHER; note = 2'-fluorouridine-3'-phosphorothioate
  modified_base 3: mod_base = OTHER; note = 2'-O-methylcytidine-3'-phosphate
  modified_base 4: mod_base = OTHER; note = 2'-fluorouridine-3'-phosphate
  modified_base 5: mod_base = OTHER; note = 2'-O-methyluridine-3'-phosphate
  modified_base 6: mod_base = OTHER; note = 2'-fluorocytidine-3'-phosphate
  modified_base 7: mod_base = OTHER; note = 2'-O-methyladenosine-3'-phosphate
  modified_base 8: mod_base = OTHER; note = 2'-fluoroadenosine-3'-phosphate
  modified_base 9: mod_base = OTHER; note = 2'-O-methylcytidine-3'-phosphate
  modified_base 10: mod_base = OTHER; note = 2'-fluoroadenosine-3'-phosphate
  modified_base 11: mod_base = OTHER; note = 2'-O-methyluridine-3'-phosphate
  modified_base 12: mod_base = OTHER; note = 2'-fluoroguanosine-3'-phosphate
  modified_base 13: mod_base = OTHER; note = 2'-O-methylcytidine-3'-phosphate
  modified_base 14: mod_base = OTHER; note = 2'-fluoroguanosine-3'-phosphorothioate
  modified_base 15: mod_base = OTHER; note = 2'-O-methylguanosine-3'-phosphorothioate
  modified_base 16: mod_base = OTHER; note = 2'-fluoroadenosine-3'-phosphorothioate
  modified_base 17: mod_base = OTHER; note = 2'-O-methyluridine-3'-phosphorothioate
  modified_base 18: mod_base = OTHER; note = 2'-fluorocytidine-3'-phosphorothioate
  modified_base 19: mod_base = OTHER; note = 2'-O-methyluridine-3'-phosphorothioate
  modified_base 20: mod_base = OTHER; note = 2'-O-methylcytidine-3'-phosphorothioate
  modified_base 21: mod_base = OTHER; note = 2'-fluorocytidine-3'-phosphate
ttcttcaacatgcggatctcc

SEQ ID NO: 91 - RNA, 21 nt, synthetic construct
  source 1..21: mol_type = other RNA
  modified_base 1: mod_base = OTHER; note = 2'-O-methyluridine-3'-phosphorothioate
  modified_base 2: mod_base = OTHER; note = 2'-fluorouridine-3'-phosphorothioate
  modified_base 3: mod_base = OTHER; note = 2'-O-methylcytidine-3'-phosphate
  modified_base 4: mod_base = OTHER; note = 2'-fluorouridine-3'-phosphate
  modified_base 5: mod_base = OTHER; note = 2'-O-methylguanosine-3'-phosphate
  modified_base 6: mod_base = OTHER; note = 2'-fluorouridine-3'-phosphate
  modified_base 7: mod_base = OTHER; note = 2'-O-methylguanosine-3'-phosphate
  modified_base 8: mod_base = OTHER; note = 2'-fluorouridine-3'-phosphate
  modified_base 9: mod_base = OTHER; note = 2'-O-methyluridine-3'-phosphate
  modified_base 10: mod_base = OTHER; note = 2'-fluoroguanosine-3'-phosphate
  modified_base 11: mod_base = OTHER; note = 2'-O-methyluridine-3'-phosphate
  modified_base 12: mod_base = OTHER; note = 2'-fluoroadenosine-3'-phosphate
  modified_base 13: mod_base = OTHER; note = 2'-O-methylcytidine-3'-phosphate
  modified_base 14: mod_base = OTHER; note = 2'-fluoroguanosine-3'-phosphorothioate
  modified_base 15: mod_base = OTHER; note = 2'-O-methyluridine-3'-phosphorothioate
  modified_base 16: mod_base = OTHER; note = 2'-fluoroguanosine-3'-phosphorothioate
  modified_base 17: mod_base = OTHER; note = 2'-O-methylcytidine-3'-phosphorothioate
  modified_base 18: mod_base = OTHER; note = 2'-fluoroadenosine-3'-phosphorothioate
  modified_base 19: mod_base = OTHER; note = 2'-O-methylguanosine-3'-phosphorothioate
  modified_base 20: mod_base = OTHER; note = 2'-O-methylguanosine-3'-phosphorothioate
  modified_base 21: mod_base = OTHER; note = 2'-fluoroadenosine-3'-phosphate
ttctgtgttgtacgtgcagga

SEQ ID NO: 92 - RNA, 21 nt, synthetic construct
  source 1..21: mol_type = other RNA
  modified_base 1: mod_base = OTHER; note = 2'-O-methyluridine-3'-phosphorothioate
  modified_base 2: mod_base = OTHER; note = 2'-fluorouridine-3'-phosphorothioate
  modified_base 3: mod_base = OTHER; note = 2'-O-methylguanosine-3'-phosphate
  modified_base 4: mod_base = OTHER; note = 2'-fluorouridine-3'-phosphate
  modified_base 5: mod_base = OTHER; note = 2'-O-methyluridine-3'-phosphate
  modified_base 6: mod_base = OTHER; note = 2'-fluoroguanosine-3'-phosphate
  modified_base 7: mod_base = OTHER; note = 2'-O-methyladenosine-3'-phosphate
  modified_base 8: mod_base = OTHER; note = 2'-fluoroadenosine-3'-phosphate
  modified_base 9: mod_base = OTHER; note = 2'-O-methylcytidine-3'-phosphate
  modified_base 10: mod_base = OTHER; note = 2'-fluorocytidine-3'-phosphate
  modified_base 11: mod_base = OTHER; note = 2'-O-methyluridine-3'-phosphate
  modified_base 12: mod_base = OTHER; note = 2'-fluoroguanosine-3'-phosphate
  modified_base 13: mod_base = OTHER; note = 2'-O-methyluridine-3'-phosphate
  modified_base 14: mod_base = OTHER; note = 2'-fluorouridine-3'-phosphorothioate
  modified_base 15: mod_base = OTHER; note = 2'-O-methylguanosine-3'-phosphorothioate
  modified_base 16: mod_base = OTHER; note = 2'-fluoroadenosine-3'-phosphorothioate
  modified_base 17: mod_base = OTHER; note = 2'-O-methyluridine-3'-phosphorothioate
  modified_base 18: mod_base = OTHER; note = 2'-fluoroguanosine-3'-phosphorothioate
  modified_base 19: mod_base = OTHER; note = 2'-O-methyladenosine-3'-phosphorothioate
  modified_base 20: mod_base = OTHER; note = 2'-O-methylguanosine-3'-phosphorothioate
  modified_base 21: mod_base = OTHER; note = 2'-fluoroguanosine-3'-phosphate
ttgttgaacctgttgatgagg

SEQ ID NO: 93 - RNA, 21 nt, synthetic construct
  source 1..21: mol_type = other RNA
  modified_base 1: mod_base = OTHER; note = 2'-O-methyluridine-3'-phosphorothioate
  modified_base 2: mod_base = OTHER; note = 2'-fluorouridine-3'-phosphorothioate
  modified_base 3: mod_base = OTHER; note = 2'-O-methylcytidine-3'-phosphate
  modified_base 4: mod_base = OTHER; note = 2'-fluorocytidine-3'-phosphate
  modified_base 5: mod_base = OTHER; note = 2'-O-methyladenosine-3'-phosphate
  modified_base 6: mod_base = OTHER; note = 2'-fluorouridine-3'-phosphate
  modified_base 7: mod_base = OTHER; note = 2'-O-methyluridine-3'-phosphate
  modified_base 8: mod_base = OTHER; note = 2'-fluorocytidine-3'-phosphate
  modified_base 9: mod_base = OTHER; note = 2'-O-methyladenosine-3'-phosphate
  modified_base 10: mod_base = OTHER; note = 2'-fluorocytidine-3'-phosphate
  modified_base 11: mod_base = OTHER; note = 2'-O-methylcytidine-3'-phosphate
  modified_base 12: mod_base = OTHER; note = 2'-fluorocytidine-3'-phosphate
  modified_base 13: mod_base = OTHER; note = 2'-O-methyluridine-3'-phosphate
  modified_base 14: mod_base = OTHER; note = 2'-fluoroguanosine-3'-phosphorothioate
  modified_base 15: mod_base = OTHER; note = 2'-O-methylguanosine-3'-phosphorothioate
  modified_base 16: mod_base = OTHER; note = 2'-fluoroadenosine-3'-phosphorothioate
  modified_base 17: mod_base = OTHER; note = 2'-O-methyladenosine-3'-phosphorothioate
  modified_base 18: mod_base = OTHER; note = 2'-fluoroguanosine-3'-phosphorothioate
  modified_base 19: mod_base = OTHER; note = 2'-O-methylcytidine-3'-phosphorothioate
  modified_base 20: mod_base = OTHER; note = 2'-O-methylguanosine-3'-phosphorothioate
  modified_base 21: mod_base = OTHER; note = 2'-fluoroguanosine-3'-phosphate
ttccattcaccctggaagcgg

SEQ ID NO: 94 - RNA, 21 nt, synthetic construct
  source 1..21: mol_type = other RNA
  modified_base 1: mod_base = OTHER; note = 2'-O-methyluridine-3'-phosphorothioate
  modified_base 2: mod_base = OTHER; note = 2'-fluorouridine-3'-phosphorothioate
  modified_base 3: mod_base = OTHER; note = 2'-O-methylcytidine-3'-phosphate
  modified_base 4: mod_base = OTHER; note = 2'-fluorocytidine-3'-phosphate
  modified_base 5: mod_base = OTHER; note = 2'-O-methyladenosine-3'-phosphate
  modified_base 6: mod_base = OTHER; note = 2'-fluoroguanosine-3'-phosphate
  modified_base 7: mod_base = OTHER; note = 2'-O-methyluridine-3'-phosphate
  modified_base 8: mod_base = OTHER; note = 2'-fluoroguanosine-3'-phosphate
  modified_base 9: mod_base = OTHER; note = 2'-O-methyluridine-3'-phosphate
  modified_base 10: mod_base = OTHER; note = 2'-fluoroguanosine-3'-phosphate
  modified_base 11: mod_base = OTHER; note = 2'-O-methylguanosine-3'-phosphate
  modified_base 12: mod_base = OTHER; note = 2'-fluoroadenosine-3'-phosphate
  modified_base 13: mod_base = OTHER; note = 2'-O-methylguanosine-3'-phosphate
  modified_base 14: mod_base = OTHER; note = 2'-fluoroadenosine-3'-phosphorothioate
  modified_base 15: mod_base = OTHER; note = 2'-O-methyluridine-3'-phosphorothioate
  modified_base 16: mod_base = OTHER; note = 2'-fluoroguanosine-3'-phosphorothioate
  modified_base 17: mod_base = OTHER; note = 2'-O-methyladenosine-3'-phosphorothioate
  modified_base 18: mod_base = OTHER; note = 2'-fluorocytidine-3'-phosphorothioate
  modified_base 19: mod_base = OTHER; note = 2'-O-methylcytidine-3'-phosphorothioate
  modified_base 20: mod_base = OTHER; note = 2'-O-methyluridine-3'-phosphorothioate
  modified_base 21: mod_base = OTHER; note = 2'-fluorouridine-3'-phosphate
ttccagtgtggagatgacctt

SEQ ID NO: 95 - RNA, 21 nt, synthetic construct
  source 1..21: mol_type = other RNA
  modified_base 1: mod_base = OTHER; note = 2'-O-methyluridine-3'-phosphorothioate
  modified_base 2: mod_base = OTHER; note = 2'-fluorouridine-3'-phosphorothioate
  modified_base 3: mod_base = OTHER; note = 2'-O-methylcytidine-3'-phosphate
  modified_base 4: mod_base = OTHER; note = 2'-fluorouridine-3'-phosphate
  modified_base 5: mod_base = OTHER; note = 2'-O-methylcytidine-3'-phosphate
  modified_base 6: mod_base = OTHER; note = 2'-fluoroadenosine-3'-phosphate
  modified_base 7: mod_base = OTHER; note = 2'-O-methylcytidine-3'-phosphate
  modified_base 8: mod_base = OTHER; note = 2'-fluoroguanosine-3'-phosphate
  modified_base 9: mod_base = OTHER; note = 2'-O-methylcytidine-3'-phosphate
  modified_base 10: mod_base = OTHER; note = 2'-fluorouridine-3'-phosphate
  modified_base 11: mod_base = OTHER; note = 2'-O-methylcytidine-3'-phosphate
  modified_base 12: mod_base = OTHER; note = 2'-fluoroguanosine-3'-phosphate
  modified_base 13: mod_base = OTHER; note = 2'-O-methylcytidine-3'-phosphate
  modified_base 14: mod_base = OTHER; note = 2'-fluorocytidine-3'-phosphorothioate
  modified_base 15: mod_base = OTHER; note = 2'-O-methyladenosine-3'-phosphorothioate
  modified_base 16: mod_base = OTHER; note = 2'-fluorocytidine-3'-phosphorothioate
  modified_base 17: mod_base = OTHER; note = 2'-O-methylguanosine-3'-phosphorothioate
  modified_base 18: mod_base = OTHER; note = 2'-fluoroguanosine-3'-phosphorothioate
  modified_base 19: mod_base = OTHER; note = 2'-fluorouridine-3'-phosphorothioate
  modified_base 20: mod_base = OTHER; note = 2'-O-methylcytidine-3'-phosphorothioate
  modified_base 21: mod_base = OTHER; note = 2'-O-methylguanosine-3'-phosphate
ttctcacgctcgccacggtcg

SEQ ID NO: 96 - RNA, 21 nt, synthetic construct
  source 1..21: mol_type = other RNA
  modified_base 1: mod_base = OTHER; note = 2'-O-methyluridine-3'-phosphorothioate
  modified_base 2: mod_base = OTHER; note = 2'-fluorouridine-3'-phosphorothioate
  modified_base 3: mod_base = OTHER; note = 2'-O-methyladenosine-3'-phosphate
  modified_base 4: mod_base = OTHER; note = 2'-fluoroadenosine-3'-phosphate
  modified_base 5: mod_base = OTHER; note = 2'-O-methyluridine-3'-phosphate
  modified_base 6: mod_base = OTHER; note = 2'-fluoroguanosine-3'-phosphate
  modified_base 7: mod_base = OTHER; note = 2'-O-methyluridine-3'-phosphate
  modified_base 8: mod_base = OTHER; note = 2'-fluoroadenosine-3'-phosphate
  modified_base 9: mod_base = OTHER; note = 2'-O-methylguanosine-3'-phosphate
  modified_base 10: mod_base = OTHER; note = 2'-fluorocytidine-3'-phosphate
  modified_base 11: mod_base = OTHER; note = 2'-O-methyladenosine-3'-phosphate
  modified_base 12: mod_base = OTHER; note = 2'-fluorocytidine-3'-phosphate
  modified_base 13: mod_base = OTHER; note = 2'-O-methylcytidine-3'-phosphate
  modified_base 14: mod_base = OTHER; note = 2'-fluoroadenosine-3'-phosphorothioate
  modified_base 15: mod_base = OTHER; note = 2'-O-methylguanosine-3'-phosphorothioate
  modified_base 16: mod_base = OTHER; note = 2'-fluorouridine-3'-phosphorothioate
  modified_base 17: mod_base = OTHER; note = 2'-O-methyladenosine-3'-phosphorothioate
  modified_base 18: mod_base = OTHER; note = 2'-fluorocytidine-3'-phosphorothioate
  modified_base 19: mod_base = OTHER; note = 2'-fluoroguanosine-3'-phosphorothioate
  modified_base 20: mod_base = OTHER; note = 2'-O-methyluridine-3'-phosphorothioate
  modified_base 21: mod_base = OTHER; note = 2'-O-methylguanosine-3'-phosphate
ttaatgtagcaccagtacgtg

SEQ ID NO: 97 - RNA, 21 nt, synthetic construct
  source 1..21: mol_type = other RNA
  modified_base 1: mod_base = OTHER; note = 2'-O-methyluridine-3'-phosphorothioate
  modified_base 2: mod_base = OTHER; note = 2'-fluorouridine-3'-phosphorothioate
  modified_base 3: mod_base = OTHER; note = 2'-O-methylcytidine-3'-phosphate
  modified_base 4: mod_base = OTHER; note = 2'-fluoroadenosine-3'-phosphate
  modified_base 5: mod_base = OTHER; note = 2'-O-methyladenosine-3'-phosphate
  modified_base 6: mod_base = OTHER; note = 2'-fluorocytidine-3'-phosphate
  modified_base 7: mod_base = OTHER; note = 2'-O-methyladenosine-3'-phosphate
  modified_base 8: mod_base = OTHER; note = 2'-fluorouridine-3'-phosphate
  modified_base 9: mod_base = OTHER; note = 2'-O-methylguanosine-3'-phosphate
  modified_base 10: mod_base = OTHER; note = 2'-fluorocytidine-3'-phosphate
  modified_base 11: mod_base = OTHER; note = 2'-O-methylguanosine-3'-phosphate
  modified_base 12: mod_base = OTHER; note = 2'-fluoroguanosine-3'-phosphate
  modified_base 13: mod_base = OTHER; note = 2'-O-methyladenosine-3'-phosphate
  modified_base 14: mod_base = OTHER; note = 2'-fluorouridine-3'-phosphorothioate
  modified_base 15: mod_base = OTHER; note = 2'-O-methylcytidine-3'-phosphorothioate
  modified_base 16: mod_base = OTHER; note = 2'-fluorouridine-3'-phosphorothioate
  modified_base 17: mod_base = OTHER; note = 2'-O-methylcytidine-3'-phosphorothioate
  modified_base 18: mod_base = OTHER; note = 2'-fluorocytidine-3'-phosphorothioate
  modified_base 19: mod_base = OTHER; note = 2'-fluorouridine-3'-phosphorothioate
  modified_base 20: mod_base = OTHER; note = 2'-O-methylguanosine-3'-phosphorothioate
  modified_base 21: mod_base = OTHER; note = 2'-O-methylguanosine-3'-phosphate
ttcaacatgcggatctcctgg

SEQ ID NO: 98 - RNA, 21 nt, synthetic construct
  source 1..21: mol_type = other RNA
  modified_base 1: mod_base = OTHER; note = 2'-O-methyluridine-3'-phosphorothioate
  modified_base 2: mod_base = OTHER; note = 2'-fluorouridine-3'-phosphorothioate
  modified_base 3: mod_base = OTHER; note = 2'-O-methylcytidine-3'-phosphate
  modified_base 4: mod_base = OTHER; note = 2'-fluorouridine-3'-phosphate
  modified_base 5: mod_base = OTHER; note = 2'-O-methyluridine-3'-phosphate
  modified_base 6: mod_base = OTHER; note = 2'-fluorocytidine-3'-phosphate
  modified_base 7: mod_base = OTHER; note = 2'-O-methyladenosine-3'-phosphate
  modified_base 8: mod_base = OTHER; note = 2'-fluoroadenosine-3'-phosphate
  modified_base 9: mod_base = OTHER; note = 2'-O-methylcytidine-3'-phosphate
  modified_base 10: mod_base = OTHER; note = 2'-fluoroadenosine-3'-phosphate
  modified_base 11: mod_base = OTHER; note = 2'-O-methyluridine-3'-phosphate
  modified_base 12: mod_base = OTHER; note = 2'-fluoroguanosine-3'-phosphate
  modified_base 13: mod_base = OTHER; note = 2'-O-methylcytidine-3'-phosphate
  modified_base 14: mod_base = OTHER; note = 2'-fluoroguanosine-3'-phosphorothioate
  modified_base 15: mod_base = OTHER; note = 2'-O-methylguanosine-3'-phosphorothioate
  modified_base 16: mod_base = OTHER; note = 2'-fluoroadenosine-3'-phosphorothioate
  modified_base 17: mod_base = OTHER; note = 2'-O-methyluridine-3'-phosphorothioate
  modified_base 18: mod_base = OTHER; note = 2'-fluorocytidine-3'-phosphorothioate
  modified_base 19: mod_base = OTHER; note = 2'-fluorouridine-3'-phosphorothioate
  modified_base 20: mod_base = OTHER; note = 2'-O-methylcytidine-3'-phosphorothioate
  modified_base 21: mod_base = OTHER; note = 2'-O-methylcytidine-3'-phosphate
ttcttcaacatgcggatctcc

SEQ ID NO: 99 - RNA, 21 nt, synthetic construct
  source 1..21: mol_type = other RNA
  modified_base 1: mod_base = OTHER; note = 2'-O-methyluridine-3'-phosphorothioate
  modified_base 2: mod_base = OTHER; note = 2'-fluorouridine-3'-phosphorothioate
  modified_base 3: mod_base = OTHER; note = 2'-O-methylcytidine-3'-phosphate
  modified_base 4: mod_base = OTHER; note = 2'-fluorouridine-3'-phosphate
  modified_base 5: mod_base = OTHER; note = 2'-O-methylguanosine-3'-phosphate
  modified_base 6: mod_base = OTHER; note = 2'-fluorouridine-3'-phosphate
  modified_base 7: mod_base = OTHER; note = 2'-O-methylguanosine-3'-phosphate
  modified_base 8: mod_base = OTHER; note = 2'-fluorouridine-3'-phosphate
  modified_base 9: mod_base = OTHER; note = 2'-O-methyluridine-3'-phosphate
  modified_base 10: mod_base = OTHER; note = 2'-fluoroguanosine-3'-phosphate
  modified_base 11: mod_base = OTHER; note = 2'-O-methyluridine-3'-phosphate
  modified_base 12: mod_base = OTHER; note = 2'-fluoroadenosine-3'-phosphate
  modified_base 13: mod_base = OTHER; note = 2'-O-methylcytidine-3'-phosphate
  modified_base 14: mod_base = OTHER; note = 2'-fluoroguanosine-3'-phosphorothioate
  modified_base 15: mod_base = OTHER; note = 2'-O-methyluridine-3'-phosphorothioate
  modified_base 16: mod_base = OTHER; note = 2'-fluoroguanosine-3'-phosphorothioate
  modified_base 17: mod_base = OTHER; note = 2'-O-methylcytidine-3'-phosphorothioate
  modified_base 18: mod_base = OTHER; note = 2'-fluoroadenosine-3'-phosphorothioate
  modified_base 19: mod_base = OTHER; note = 2'-fluoroguanosine-3'-phosphorothioate
  modified_base 20: mod_base = OTHER; note = 2'-O-methylguanosine-3'-phosphorothioate
  modified_base 21: mod_base = OTHER; note = 2'-O-methyladenosine-3'-phosphate
ttctgtgttgtacgtgcagga

SEQ ID NO: 100 - RNA, 21 nt, synthetic construct
  source 1..21: mol_type = other RNA
  modified_base 1: mod_base = OTHER; note = 2'-O-methyluridine-3'-phosphorothioate
  modified_base 2: mod_base = OTHER; note = 2'-fluorouridine-3'-phosphorothioate
  modified_base 3: mod_base = OTHER; note = 2'-O-methylguanosine-3'-phosphate
  modified_base 4: mod_base = OTHER; note = 2'-fluorouridine-3'-phosphate
  modified_base 5: mod_base = OTHER; note = 2'-O-methyluridine-3'-phosphate
  modified_base 6: mod_base = OTHER; note = 2'-fluoroguanosine-3'-phosphate
  modified_base 7: mod_base = OTHER; note = 2'-O-methyladenosine-3'-phosphate
  modified_base 8: mod_base = OTHER; note = 2'-fluoroadenosine-3'-phosphate
  modified_base 9: mod_base = OTHER; note = 2'-O-methylcytidine-3'-phosphate
  modified_base 10: mod_base = OTHER; note = 2'-fluorocytidine-3'-phosphate
  modified_base 11: mod_base = OTHER; note = 2'-O-methyluridine-3'-phosphate
  modified_base 12: mod_base = OTHER; note = 2'-fluoroguanosine-3'-phosphate
  modified_base 13: mod_base = OTHER; note = 2'-O-methyluridine-3'-phosphate
  modified_base 14: mod_base = OTHER; note = 2'-fluorouridine-3'-phosphorothioate
  modified_base 15: mod_base = OTHER; note = 2'-O-methylguanosine-3'-phosphorothioate
  modified_base 16: mod_base = OTHER; note = 2'-fluoroadenosine-3'-phosphorothioate
  modified_base 17: mod_base = OTHER; note = 2'-O-methyluridine-3'-phosphorothioate
  modified_base 18: mod_base = OTHER; note = 2'-fluoroguanosine-3'-phosphorothioate
  modified_base 19: mod_base = OTHER; note = 2'-fluoroadenosine-3'-phosphorothioate
  modified_base 20: mod_base = OTHER; note = 2'-O-methylguanosine-3'-phosphorothioate
  modified_base 21: mod_base = OTHER; note = 2'-O-methylguanosine-3'-phosphate
ttgttgaacctgttgatgagg

SEQ ID NO: 101 - RNA, 21 nt, synthetic construct
  source 1..21: mol_type = other RNA
  modified_base 1: mod_base = OTHER; note = 2'-O-methyluridine-3'-phosphorothioate
  modified_base 2: mod_base = OTHER; note = 2'-fluorouridine-3'-phosphorothioate
  modified_base 3: mod_base = OTHER; note = 2'-O-methylcytidine-3'-phosphate
  modified_base 4: mod_base = OTHER; note = 2'-fluorocytidine-3'-phosphate
  modified_base 5: mod_base = OTHER; note = 2'-O-methyladenosine-3'-phosphate
  modified_base 6: mod_base = OTHER; note = 2'-fluorouridine-3'-phosphate
  modified_base 7: mod_base = OTHER; note = 2'-O-methyluridine-3'-phosphate
  modified_base 8: mod_base = OTHER; note = 2'-fluorocytidine-3'-phosphate
  modified_base 9: mod_base = OTHER; note = 2'-O-methyladenosine-3'-phosphate
  modified_base 10: mod_base = OTHER; note = 2'-fluorocytidine-3'-phosphate
  modified_base 11: mod_base = OTHER; note = 2'-O-methylcytidine-3'-phosphate
  modified_base 12: mod_base = OTHER; note = 2'-fluorocytidine-3'-phosphate
  modified_base 13: mod_base = OTHER; note = 2'-O-methyluridine-3'-phosphate
  modified_base 14: mod_base = OTHER; note = 2'-fluoroguanosine-3'-phosphorothioate
  modified_base 15: mod_base = OTHER; note = 2'-O-methylguanosine-3'-phosphorothioate
  modified_base 16: mod_base = OTHER; note = 2'-fluoroadenosine-3'-phosphorothioate
  modified_base 17: mod_base = OTHER; note = 2'-O-methyladenosine-3'-phosphorothioate
  modified_base 18: mod_base = OTHER; note = 2'-fluoroguanosine-3'-phosphorothioate
  modified_base 19: mod_base = OTHER; note = 2'-fluorocytidine-3'-phosphorothioate
  modified_base 20: mod_base = OTHER; note = 2'-O-methylguanosine-3'-phosphorothioate
  modified_base 21: mod_base = OTHER; note = 2'-O-methylguanosine-3'-phosphate
ttccattcaccctggaagcgg

SEQ ID NO: 102 - RNA, 21 nt, synthetic construct
  source 1..21: mol_type = other RNA
  modified_base 1: mod_base = OTHER; note = 2'-O-methyluridine-3'-phosphorothioate
  modified_base 2: mod_base = OTHER; note = 2'-fluorouridine-3'-phosphorothioate
  modified_base 3: mod_base = OTHER; note = 2'-O-methylcytidine-3'-phosphate
  modified_base 4: mod_base = OTHER; note = 2'-fluorocytidine-3'-phosphate
  modified_base 5: mod_base = OTHER; note = 2'-O-methyladenosine-3'-phosphate
  modified_base 6: mod_base = OTHER; note = 2'-fluoroguanosine-3'-phosphate
  modified_base 7: mod_base = OTHER; note = 2'-O-methyluridine-3'-phosphate
  modified_base 8: mod_base = OTHER; note = 2'-fluoroguanosine-3'-phosphate
  modified_base 9: mod_base = OTHER; note = 2'-O-methyluridine-3'-phosphate
  modified_base 10: mod_base = OTHER; note = 2'-fluoroguanosine-3'-phosphate
  modified_base 11: mod_base = OTHER; note = 2'-O-methylguanosine-3'-phosphate
  modified_base 12: mod_base = OTHER; note = 2'-fluoroadenosine-3'-phosphate
  modified_base 13: mod_base = OTHER; note = 2'-O-methylguanosine-3'-phosphate
  modified_base 14: mod_base = OTHER; note = 2'-fluoroadenosine-3'-phosphorothioate
  modified_base 15: mod_base = OTHER; note = 2'-O-methyluridine-3'-phosphorothioate
  modified_base 16: mod_base = OTHER; note = 2'-fluoroguanosine-3'-phosphorothioate
  modified_base 17: mod_base = OTHER; note = 2'-O-methyladenosine-3'-phosphorothioate
  modified_base 18: mod_base = OTHER; note = 2'-fluorocytidine-3'-phosphorothioate
  modified_base 19: mod_base = OTHER; note = 2'-fluorocytidine-3'-phosphorothioate
  modified_base 20: mod_base = OTHER; note = 2'-O-methyluridine-3'-phosphorothioate
  modified_base 21: mod_base = OTHER; note = 2'-O-methyluridine-3'-phosphate
ttccagtgtggagatgacctt

SEQ ID NO: 103 - RNA, 21 nt, synthetic construct
  source 1..21: mol_type = other RNA
  modified_base 1: mod_base = OTHER; note = 2'-O-methyluridine-3'-phosphorothioate
  modified_base 2: mod_base = OTHER; note = 2'-fluorouridine-3'-phosphorothioate
  modified_base 3: mod_base = OTHER; note = 2'-O-methylcytidine-3'-phosphate
  modified_base 4: mod_base = OTHER; note = 2'-fluorouridine-3'-phosphate
  modified_base 5: mod_base = OTHER; note = 2'-O-methylcytidine-3'-phosphate
  modified_base 6: mod_base = OTHER; note = 2'-fluoroadenosine-3'-phosphate
  modified_base 7: mod_base = OTHER; note = 2'-O-methyladenosine-3'-phosphate
  modified_base 8: mod_base = OTHER; note = 2'-fluoroguanosine-3'-phosphate
  modified_base 9: mod_base = OTHER; note = 2'-O-methylcytidine-3'-phosphate
  modified_base 10: mod_base = OTHER; note = 2'-fluorouridine-3'-phosphate
  modified_base 11: mod_base = OTHER; note = 2'-O-methylcytidine-3'-phosphate
  modified_base 12: mod_base = OTHER; note = 2'-fluoroguanosine-3'-phosphate
  modified_base 13: mod_base = OTHER; note = 2'-O-methylcytidine-3'-phosphate
  modified_base 14: mod_base = OTHER; note = 2'-fluorocytidine-3'-phosphorothioate
  modified_base 15: mod_base = OTHER; note = 2'-O-methyladenosine-3'-phosphorothioate
  modified_base 16: mod_base = OTHER; note = 2'-fluorocytidine-3'-phosphorothioate
  modified_base 17: mod_base = OTHER; note = 2'-O-methylguanosine-3'-phosphorothioate
  modified_base 18: mod_base = OTHER; note = 2'-fluoroguanosine-3'-phosphorothioate
  modified_base 19: mod_base = OTHER; note = 2'-O-methyluridine-3'-phosphorothioate
  modified_base 20: mod_base = OTHER; note = 2'-fluorocytidine-3'-phosphorothioate
  modified_base 21: mod_base = OTHER; note = 2'-O-methylguanosine-3'-phosphate
ttctcaagctcgccacggtcg

SEQ ID NO: 104 - RNA, 21 nt, synthetic construct
  source 1..21: mol_type = other RNA
  modified_base 1: mod_base = OTHER; note = 2'-O-methyluridine-3'-phosphorothioate
  modified_base 2: mod_base = OTHER; note = 2'-fluorouridine-3'-phosphorothioate
  modified_base 3: mod_base = OTHER; note = 2'-O-methyladenosine-3'-phosphate
  modified_base 4: mod_base = OTHER; note = 2'-fluoroadenosine-3'-phosphate
  modified_base 5: mod_base = OTHER; note = 2'-O-methyluridine-3'-phosphate
  modified_base 6: mod_base = OTHER; note = 2'-fluoroguanosine-3'-phosphate
  modified_base 7: mod_base = OTHER; note = 2'-O-methyluridine-3'-phosphate
  modified_base 8: mod_base = OTHER; note = 2'-fluoroadenosine-3'-phosphate
  modified_base 9: mod_base = OTHER; note = 2'-O-methylguanosine-3'-phosphate
  modified_base 10: mod_base = OTHER; note = 2'-fluorocytidine-3'-phosphate
  modified_base 11: mod_base = OTHER; note = 2'-O-methyladenosine-3'-phosphate
  modified_base 12: mod_base = OTHER; note = 2'-fluorocytidine-3'-phosphate
  modified_base 13: mod_base = OTHER; note = 2'-O-methylcytidine-3'-phosphate
  modified_base 14: mod_base = OTHER; note = 2'-fluoroadenosine-3'-phosphorothioate
  modified_base 15: mod_base = OTHER; note = 2'-O-methylguanosine-3'-phosphorothioate
  modified_base 16: mod_base = OTHER; note = 2'-fluorouridine-3'-phosphorothioate
  modified_base 17: mod_base = OTHER; note = 2'-O-methyladenosine-3'-phosphorothioate
  modified_base 18: mod_base = OTHER; note = 2'-fluorocytidine-3'-phosphorothioate
  modified_base 19: mod_base = OTHER; note = 2'-O-methylguanosine-3'-phosphorothioate
  modified_base 20: mod_base = OTHER; note = 2'-fluorouridine-3'-phosphorothioate
  modified_base 21: mod_base = OTHER; note = 2'-O-methylguanosine-3'-phosphate
ttaatgtagcaccagtacgtg

SEQ ID NO: 105 - RNA, 21 nt, synthetic construct
  source 1..21: mol_type = other RNA
  modified_base 1: mod_base = OTHER; note = 2'-O-methyluridine-3'-phosphorothioate
  modified_base 2: mod_base = OTHER; note = 2'-fluorouridine-3'-phosphorothioate
  modified_base 3: mod_base = OTHER; note = 2'-O-methylcytidine-3'-phosphate
  modified_base 4: mod_base = OTHER; note = 2'-fluoroadenosine-3'-phosphate
  modified_base 5: mod_base = OTHER; note = 2'-O-methyladenosine-3'-phosphate
  modified_base 6: mod_base = OTHER; note = 2'-fluorocytidine-3'-phosphate
  modified_base 7: mod_base = OTHER; note = 2'-O-methyladenosine-3'-phosphate
  modified_base 8: mod_base = OTHER; note = 2'-fluorouridine-3'-phosphate
  modified_base 9: mod_base = OTHER; note = 2'-O-methylguanosine-3'-phosphate
  modified_base 10: mod_base = OTHER; note = 2'-fluorocytidine-3'-phosphate
  modified_base 11: mod_base = OTHER; note = 2'-O-methylguanosine-3'-phosphate
  modified_base 12: mod_base = OTHER; note = 2'-fluoroguanosine-3'-phosphate
  modified_base 13: mod_base = OTHER; note = 2'-O-methyladenosine-3'-phosphate
  modified_base 14: mod_base = OTHER; note = 2'-fluorouridine-3'-phosphorothioate
  modified_base 15: mod_base = OTHER; note = 2'-O-methylcytidine-3'-phosphorothioate
  modified_base 16: mod_base = OTHER; note = 2'-fluorouridine-3'-phosphorothioate
  modified_base 17: mod_base = OTHER; note = 2'-O-methylcytidine-3'-phosphorothioate
  modified_base 18: mod_base = OTHER; note = 2'-fluorocytidine-3'-phosphorothioate
  modified_base 19: mod_base = OTHER; note = 2'-O-methyluridine-3'-phosphorothioate
  modified_base 20: mod_base = OTHER; note = 2'-fluoroguanosine-3'-phosphorothioate
  modified_base 21: mod_base = OTHER; note = 2'-O-methylguanosine-3'-phosphate
ttcaacatgcggatctcctgg

SEQ ID NO: 106 - RNA, 21 nt, synthetic construct
  source 1..21: mol_type = other RNA
  modified_base 1: mod_base = OTHER; note = 2'-O-methyluridine-3'-phosphorothioate
  modified_base 2: mod_base = OTHER; note = 2'-fluorouridine-3'-phosphorothioate
  modified_base 3: mod_base = OTHER; note = 2'-O-methylcytidine-3'-phosphate
  modified_base 4: mod_base = OTHER; note = 2'-fluorouridine-3'-phosphate
  modified_base 5: mod_base = OTHER; note = 2'-O-methyluridine-3'-phosphate
  modified_base 6: mod_base = OTHER; note = 2'-fluorocytidine-3'-phosphate
  modified_base 7: mod_base = OTHER; note = 2'-O-methyladenosine-3'-phosphate
  modified_base 8: mod_base = OTHER; note = 2'-fluoroadenosine-3'-phosphate
  modified_base 9: mod_base = OTHER; note = 2'-O-methylcytidine-3'-phosphate
  modified_base 10: mod_base = OTHER; note = 2'-fluoroadenosine-3'-phosphate
  modified_base 11: mod_base = OTHER; note = 2'-O-methyluridine-3'-phosphate
  modified_base 12: mod_base = OTHER; note = 2'-fluoroguanosine-3'-phosphate
  modified_base 13: mod_base = OTHER; note = 2'-O-methylcytidine-3'-phosphate
  modified_base 14: mod_base = OTHER; note = 2'-fluoroguanosine-3'-phosphorothioate
  modified_base 15: mod_base = OTHER; note = 2'-O-methylguanosine-3'-phosphorothioate
  modified_base 16: mod_base = OTHER; note = 2'-fluoroadenosine-3'-phosphorothioate
  modified_base 17: mod_base = OTHER; note = 2'-O-methyluridine-3'-phosphorothioate
  modified_base 18: mod_base = OTHER; note = 2'-fluorocytidine-3'-phosphorothioate
  modified_base 19: mod_base = OTHER; note = 2'-O-methyluridine-3'-phosphorothioate
  modified_base 20: mod_base = OTHER; note = 2'-fluorocytidine-3'-phosphorothioate
  modified_base 21: mod_base = OTHER; note = 2'-O-methylcytidine-3'-phosphate
ttcttcaacatgcggatctcc

SEQ ID NO: 107 - RNA, 21 nt, synthetic construct
  source 1..21: mol_type = other RNA
  modified_base 1: mod_base = OTHER; note = 2'-O-methyluridine-3'-phosphorothioate
  modified_base 2: mod_base = OTHER; note = 2'-fluorouridine-3'-phosphorothioate
  modified_base 3: mod_base = OTHER; note = 2'-O-methylcytidine-3'-phosphate
  modified_base 4: mod_base = OTHER; note = 2'-fluorouridine-3'-phosphate
  modified_base 5: mod_base = OTHER; note = 2'-O-methylguanosine-3'-phosphate
  modified_base 6: mod_base = OTHER; note = 2'-fluorouridine-3'-phosphate
  modified_base 7: mod_base = OTHER; note = 2'-O-methylguanosine-3'-phosphate
  modified_base 8: mod_base = OTHER; note = 2'-fluorouridine-3'-phosphate
  modified_base 9: mod_base = OTHER; note = 2'-O-methyluridine-3'-phosphate
  modified_base 10: mod_base = OTHER; note = 2'-fluoroguanosine-3'-phosphate
  modified_base 11: mod_base = OTHER; note = 2'-O-methyluridine-3'-phosphate
  modified_base 12: mod_base = OTHER; note = 2'-fluoroadenosine-3'-phosphate
  modified_base 13: mod_base = OTHER; note = 2'-O-methylcytidine-3'-phosphate
  modified_base 14: mod_base = OTHER; note = 2'-fluoroguanosine-3'-phosphorothioate
  modified_base 15: mod_base = OTHER; note = 2'-O-methyluridine-3'-phosphorothioate
  modified_base 16: mod_base = OTHER; note = 2'-fluoroguanosine-3'-phosphorothioate
  modified_base 17: mod_base = OTHER; note = 2'-O-methylcytidine-3'-phosphorothioate
  modified_base 18: mod_base = OTHER; note = 2'-fluoroadenosine-3'-phosphorothioate
  modified_base 19: mod_base = OTHER; note = 2'-O-methylguanosine-3'-phosphorothioate
  modified_base 20: mod_base = OTHER; note = 2'-fluoroguanosine-3'-phosphorothioate
  modified_base 21: mod_base = OTHER; note = 2'-O-methyladenosine-3'-phosphate
ttctgtgttgtacgtgcagga

SEQ ID NO: 108 - RNA, 21 nt, synthetic construct
  source 1..21: mol_type = other RNA
  modified_base 1: mod_base = OTHER; note = 2'-O-methyluridine-3'-phosphorothioate
  modified_base 2: mod_base = OTHER; note = 2'-fluorouridine-3'-phosphorothioate
  modified_base 3: mod_base = OTHER; note = 2'-O-methylguanosine-3'-phosphate
  modified_base 4: mod_base = OTHER; note = 2'-fluorouridine-3'-phosphate
  modified_base 5: mod_base = OTHER; note = 2'-O-methyluridine-3'-phosphate
  modified_base 6: mod_base = OTHER; note = 2'-fluoroguanosine-3'-phosphate
  modified_base 7: mod_base = OTHER; note = 2'-O-methyladenosine-3'-phosphate
  modified_base 8: mod_base = OTHER; note = 2'-fluoroadenosine-3'-phosphate
  modified_base 9: mod_base = OTHER; note = 2'-O-methylcytidine-3'-phosphate
  modified_base 10: mod_base = OTHER; note = 2'-fluorocytidine-3'-phosphate
  modified_base 11: mod_base = OTHER; note = 2'-O-methyluridine-3'-phosphate
  modified_base 12: mod_base = OTHER; note = 2'-fluoroguanosine-3'-phosphate
  modified_base 13: mod_base = OTHER; note = 2'-O-methyluridine-3'-phosphate
  modified_base 14: mod_base = OTHER; note = 2'-fluorouridine-3'-phosphorothioate
  modified_base 15: mod_base = OTHER; note = 2'-O-methylguanosine-3'-phosphorothioate
  modified_base 16: mod_base = OTHER; note = 2'-fluoroadenosine-3'-phosphorothioate
  modified_base 17: mod_base = OTHER; note = 2'-O-methyluridine-3'-phosphorothioate
  modified_base 18: mod_base = OTHER; note = 2'-fluoroguanosine-3'-phosphorothioate
  modified_base 19: mod_base = OTHER; note = 2'-O-methyladenosine-3'-phosphorothioate
  modified_base 20: mod_base = OTHER; note = 2'-fluoroguanosine-3'-phosphorothioate
  modified_base 21: mod_base = OTHER; note = 2'-O-methylguanosine-3'-phosphate
ttgttgaacctgttgatgagg

SEQ ID NO: 109 - RNA, 21 nt, synthetic construct
  source 1..21: mol_type = other RNA
  modified_base 1: mod_base = OTHER; note = 2'-O-methyluridine-3'-phosphorothioate
  modified_base 2: mod_base = OTHER; note = 2'-fluorouridine-3'-phosphorothioate
  modified_base 3: mod_base = OTHER; note = 2'-O-methylcytidine-3'-phosphate
  modified_base 4: mod_base = OTHER; note = 2'-fluorocytidine-3'-phosphate
  modified_base 5: mod_base = OTHER; note = 2'-O-methyladenosine-3'-phosphate
  modified_base 6: mod_base = OTHER; note = 2'-fluorouridine-3'-phosphate
  modified_base 7: mod_base = OTHER; note = 2'-O-methyluridine-3'-phosphate
  modified_base 8: mod_base = OTHER; note = 2'-fluorocytidine-3'-phosphate
  modified_base 9: mod_base = OTHER; note = 2'-O-methyladenosine-3'-phosphate
  modified_base 10: mod_base = OTHER; note = 2'-fluorocytidine-3'-phosphate
  modified_base 11: mod_base = OTHER; note = 2'-O-methylcytidine-3'-phosphate
  modified_base 12: mod_base = OTHER; note = 2'-fluorocytidine-3'-phosphate
  modified_base 13: mod_base = OTHER; note = 2'-O-methyluridine-3'-phosphate
  modified_base 14: mod_base = OTHER; note = 2'-fluoroguanosine-3'-phosphorothioate
  modified_base 15: mod_base = OTHER; note = 2'-O-methylguanosine-3'-phosphorothioate
  modified_base 16: mod_base = OTHER; note = 2'-fluoroadenosine-3'-phosphorothioate
  modified_base 17: mod_base = OTHER; note = 2'-O-methyladenosine-3'-phosphorothioate
  modified_base 18: mod_base = OTHER; note = 2'-fluoroguanosine-3'-phosphorothioate
  modified_base 19: mod_base = OTHER; note = 2'-O-methylcytidine-3'-phosphorothioate
  modified_base 20: mod_base = OTHER; note = 2'-fluoroguanosine-3'-phosphorothioate
  modified_base 21: mod_base = OTHER; note = 2'-O-methylguanosine-3'-phosphate
ttccattcaccctggaagcgg

SEQ ID NO: 110 - RNA, 21 nt, synthetic construct
  source 1..21: mol_type = other RNA
  modified_base 1: mod_base = OTHER; note = 2'-O-methyluridine-3'-phosphorothioate
  modified_base 2: mod_base = OTHER; note = 2'-fluorouridine-3'-phosphorothioate
  modified_base 3: mod_base = OTHER; note = 2'-O-methylcytidine-3'-phosphate
  modified_base 4: mod_base = OTHER; note = 2'-fluorocytidine-3'-phosphate
  modified_base 5: mod_base = OTHER; note = 2'-O-methyladenosine-3'-phosphate
  modified_base 6: mod_base = OTHER; note = 2'-fluoroguanosine-3'-phosphate
  modified_base 7: mod_base = OTHER; note = 2'-O-methyluridine-3'-phosphate
  modified_base 8: mod_base = OTHER; note = 2'-fluoroguanosine-3'-phosphate
  modified_base 9: mod_base = OTHER; note = 2'-O-methyluridine-3'-phosphate
  modified_base 10: mod_base = OTHER; note = 2'-fluoroguanosine-3'-phosphate
  modified_base 11: mod_base = OTHER; note = 2'-O-methylguanosine-3'-phosphate
  modified_base 12: mod_base = OTHER; note = 2'-fluoroadenosine-3'-phosphate
  modified_base 13: mod_base = OTHER; note = 2'-O-methylguanosine-3'-phosphate
  modified_base 14: mod_base = OTHER; note = 2'-fluoroadenosine-3'-phosphorothioate
  modified_base 15: mod_base = OTHER; note = 2'-O-methyluridine-3'-phosphorothioate
  modified_base 16: mod_base = OTHER; note = 2'-fluoroguanosine-3'-phosphorothioate
  modified_base 17: mod_base = OTHER; note = 2'-O-methyladenosine-3'-phosphorothioate
  modified_base 18: mod_base = OTHER; note = 2'-fluorocytidine-3'-phosphorothioate
  modified_base 19: mod_base = OTHER; note = 2'-O-methylcytidine-3'-phosphorothioate
  modified_base 20: mod_base = OTHER; note = 2'-fluorouridine-3'-phosphorothioate
  modified_base 21: mod_base = OTHER; note = 2'-O-methyluridine-3'-phosphate
ttccagtgtggagatgacctt

SEQ ID NO: 111 - RNA, 21 nt, Homo sapiens
  source 1..21: mol_type = mRNA
cgaccgtggcgagcttgagaa

SEQ ID NO: 112 - RNA, 21 nt, Homo sapiens
  source 1..21: mol_type = mRNA
cacgtactggtgctacattaa

SEQ ID NO: 113 - RNA, 21 nt, Homo sapiens
  source 1..21: mol_type = mRNA
ccaggagatccgcatgttgaa

SEQ ID NO: 114 - RNA, 21 nt, Homo sapiens
  source 1..21: mol_type = mRNA
ggagatccgcatgttgaagaa

SEQ ID NO: 115 - RNA, 21 nt, Homo sapiens
  source 1..21: mol_type = mRNA
tcctgcacgtacaacacagaa

SEQ ID NO: 116 - RNA, 21 nt, Homo sapiens
  source 1..21: mol_type = mRNA
cctcatcaacaggttcaacaa

SEQ ID NO: 117 - RNA, 21 nt, Homo sapiens
  source 1..21: mol_type = mRNA
ccgcttccagggtgaatggaa

SEQ ID NO: 118 - RNA, 21 nt, Homo sapiens
  source 1..21: mol_type = mRNA
aaggtcatctccacactggaa

SEQ ID NO: 119 - RNA, 23 nt, synthetic construct
  source 1..23: mol_type = other RNA
  modified_base 1: mod_base = OTHER; note = 2'-fluorocytidine-3'-phosphate
  modified_base 2: mod_base = OTHER; note = 2'-O-methylguanosine-3'-phosphate
  modified_base 3: mod_base = OTHER; note = 2'-fluoroadenosine-3'-phosphate
  modified_base 4: mod_base = OTHER; note = 2'-O-methylcytidine-3'-phosphate
  modified_base 5: mod_base = OTHER; note = 2'-fluorocytidine-3'-phosphate
  modified_base 6: mod_base = OTHER; note = 2'-O-methylguanosine-3'-phosphate
  modified_base 7: mod_base = OTHER; note = 2'-fluorouridine-3'-phosphate
  modified_base 8: mod_base = OTHER; note = 2'-O-methylguanosine-3'-phosphate
  modified_base 9: mod_base = OTHER; note = 2'-fluoroguanosine-3'-phosphate
  modified_base 10: mod_base = OTHER; note = 2'-O-methylcytidine-3'-phosphate
  modified_base 11: mod_base = OTHER; note = 2'-fluoroguanosine-3'-phosphate
  modified_base 12: mod_base = OTHER; note = 2'-O-methyladenosine-3'-phosphate
  modified_base 13: mod_base = OTHER; note = 2'-fluoroguanosine-3'-phosphate
  modified_base 14: mod_base = OTHER; note = 2'-O-methylcytidine-3'-phosphate
  modified_base 15: mod_base = OTHER; note = 2'-fluorouridine-3'-phosphate
  modified_base 16: mod_base = OTHER; note = 2'-O-methyluridine-3'-phosphate
  modified_base 17: mod_base = OTHER; note = 2'-fluoroguanosine-3'-phosphate
  modified_base 18: mod_base = OTHER; note = 2'-O-methyladenosine-3'-phosphate
  modified_base 19: mod_base = OTHER; note = 2'-fluoroguanosine-3'-phosphate
  modified_base 20: mod_base = OTHER; note = 2'-O-methyladenosine-3'-phosphate
  modified_base 21: mod_base = OTHER; note = 2'-fluoroadenosine-3'-phosphorothioate
  modified_base 22: mod_base = OTHER; note = 2'-deoxythymidine-3'-phosphate
  modified_base 23: mod_base = OTHER; note = 2'-deoxythymidine-3'-phosphate
cgaccgtggcgagcttgagaatt

SEQ ID NO: 120 - RNA, 23 nt, synthetic construct
  source 1..23: mol_type = other RNA
  modified_base 1: mod_base = OTHER; note = 2'-fluorocytidine-3'-phosphate
  modified_base 2: mod_base = OTHER; note = 2'-O-methyladenosine-3'-phosphate
  modified_base 3: mod_base = OTHER; note = 2'-fluorocytidine-3'-phosphate
  modified_base 4: mod_base = OTHER; note = 2'-O-methylguanosine-3'-phosphate
  modified_base 5: mod_base = OTHER; note = 2'-fluorouridine-3'-phosphate
  modified_base 6: mod_base = OTHER; note = 2'-O-methyladenosine-3'-phosphate
  modified_base 7: mod_base = OTHER; note = 2'-fluorocytidine-3'-phosphate
  modified_base 8: mod_base = OTHER; note = 2'-O-methyluridine-3'-phosphate
  modified_base 9: mod_base = OTHER; note = 2'-fluoroguanosine-3'-phosphate
  modified_base 10: mod_base = OTHER; note = 2'-O-methylguanosine-3'-phosphate
  modified_base 11: mod_base = OTHER; note = 2'-fluorouridine-3'-phosphate
  modified_base 12: mod_base = OTHER; note = 2'-O-methylguanosine-3'-phosphate
  modified_base 13: mod_base = OTHER; note = 2'-fluorocytidine-3'-phosphate
  modified_base 14: mod_base = OTHER; note = 2'-O-methyluridine-3'-phosphate
  modified_base 15: mod_base = OTHER; note = 2'-fluoroadenosine-3'-phosphate
  modified_base 16: mod_base = OTHER; note = 2'-O-methylcytidine-3'-phosphate
  modified_base 17: mod_base = OTHER; note = 2'-fluoroadenosine-3'-phosphate
  modified_base 18: mod_base = OTHER; note = 2'-O-methyluridine-3'-phosphate
  modified_base 19: mod_base = OTHER; note = 2'-fluorouridine-3'-phosphate
  modified_base 20: mod_base = OTHER; note = 2'-O-methyladenosine-3'-phosphate
  modified_base 21: mod_base = OTHER; note = 2'-fluoroadenosine-3'-phosphorothioate
  modified_base 22: mod_base = OTHER; note = 2'-deoxythymidine-3'-phosphate
  modified_base 23: mod_base = OTHER; note = 2'-deoxythymidine-3'-phosphate
cacgtactggtgctacattaatt

SEQ ID NO: 121 - RNA, 23 nt, synthetic construct
  source 1..23: mol_type = other RNA
  modified_base 1: mod_base = OTHER; note = 2'-fluorocytidine-3'-phosphate
  modified_base 2: mod_base = OTHER; note = 2'-O-methylcytidine-3'-phosphate
  modified_base 3: mod_base = OTHER; note = 2'-fluoroadenosine-3'-phosphate
  modified_base 4: mod_base = OTHER; note = 2'-O-methylguanosine-3'-phosphate
  modified_base 5: mod_base = OTHER; note = 2'-fluoroguanosine-3'-phosphate
  modified_base 6: mod_base = OTHER; note = 2'-O-methyladenosine-3'-phosphate
  modified_base 7: mod_base = OTHER; note = 2'-fluoroguanosine-3'-phosphate
  modified_base 8: mod_base = OTHER; note = 2'-O-methyladenosine-3'-phosphate
  modified_base 9: mod_base = OTHER; note = 2'-fluorouridine-3'-phosphate
  modified_base 10: mod_base = OTHER; note = 2'-O-methylcytidine-3'-phosphate
  modified_base 11: mod_base = OTHER; note = 2'-fluorocytidine-3'-phosphate
  modified_base 12: mod_base = OTHER; note = 2'-O-methylguanosine-3'-phosphate
  modified_base 13: mod_base = OTHER; note = 2'-fluorocytidine-3'-phosphate
  modified_base 14: mod_base = OTHER; note = 2'-O-methyladenosine-3'-phosphate
  modified_base 15: mod_base = OTHER; note = 2'-fluorouridine-3'-phosphate
  modified_base 16: mod_base = OTHER; note = 2'-O-methylguanosine-3'-phosphate
  modified_base 17: mod_base = OTHER; note = 2'-fluorouridine-3'-phosphate
  modified_base 18: mod_base = OTHER; note = 2'-O-methyluridine-3'-phosphate
  modified_base 19: mod_base = OTHER; note = 2'-fluoroguanosine-3'-phosphate
  modified_base 20: mod_base = OTHER; note = 2'-O-methyladenosine-3'-phosphate
  modified_base 21: mod_base = OTHER; note = 2'-fluoroadenosine-3'-phosphorothioate
  modified_base 22: mod_base = OTHER; note = 2'-deoxythymidine-3'-phosphate
  modified_base 23: mod_base = OTHER; note = 2'-deoxythymidine-3'-phosphate
ccaggagatccgcatgttgaatt

SEQ ID NO: 122 - RNA, 23 nt, synthetic construct
  source 1..23: mol_type = other RNA
  modified_base 1: mod_base = OTHER; note = 2'-fluoroguanosine-3'-phosphate
  modified_base 2: mod_base = OTHER; note = 2'-O-methylguanosine-3'-phosphate
  modified_base 3: mod_base = OTHER; note = 2'-fluoroadenosine-3'-phosphate
  modified_base 4: mod_base = OTHER; note = 2'-O-methylguanosine-3'-phosphate
  modified_base 5: mod_base = OTHER; note = 2'-fluoroadenosine-3'-phosphate
  modified_base 6: mod_base = OTHER; note = 2'-O-methyluridine-3'-phosphate
  modified_base 7: mod_base = OTHER; note = 2'-fluorocytidine-3'-phosphate
  modified_base 8: mod_base = OTHER; note = 2'-O-methylcytidine-3'-phosphate
  modified_base 9: mod_base = OTHER; note = 2'-fluoroguanosine-3'-phosphate
  modified_base 10: mod_base = OTHER; note = 2'-O-methylcytidine-3'-phosphate
  modified_base 11: mod_base = OTHER; note = 2'-fluoroadenosine-3'-phosphate
  modified_base 12: mod_base = OTHER; note = 2'-O-methyluridine-3'-phosphate
  modified_base 13: mod_base = OTHER; note = 2'-fluoroguanosine-3'-phosphate
  modified_base 14: mod_base = OTHER; note = 2'-O-methyluridine-3'-phosphate
  modified_base 15: mod_base = OTHER; note = 2'-fluorouridine-3'-phosphate
  modified_base 16: mod_base = OTHER; note = 2'-O-methylguanosine-3'-phosphate
  modified_base 17: mod_base = OTHER; note = 2'-fluoroadenosine-3'-phosphate
  modified_base 18: mod_base = OTHER; note = 2'-O-methyladenosine-3'-phosphate
  modified_base 19: mod_base = OTHER; note = 2'-fluoroguanosine-3'-phosphate
  modified_base 20: mod_base = OTHER; note = 2'-O-methyladenosine-3'-phosphate
  modified_base 21: mod_base = OTHER; note = 2'-fluoroadenosine-3'-phosphorothioate
  modified_base 22: mod_base = OTHER; note = 2'-deoxythymidine-3'-phosphate
  modified_base 23: mod_base = OTHER; note = 2'-deoxythymidine-3'-phosphate
ggagatccgcatgttgaagaatt

SEQ ID NO: 123 - RNA, 23 nt, synthetic construct
  source 1..23: mol_type = other RNA
  modified_base 1: mod_base = OTHER; note = 2'-fluorouridine-3'-phosphate
  modified_base 2: mod_base = OTHER; note = 2'-O-methylcytidine-3'-phosphate
  modified_base 3: mod_base = OTHER; note = 2'-fluorocytidine-3'-phosphate
  modified_base 4: mod_base = OTHER; note = 2'-O-methyluridine-3'-phosphate
  modified_base 5: mod_base = OTHER; note = 2'-fluoroguanosine-3'-phosphate
  modified_base 6: mod_base = OTHER; note = 2'-O-methylcytidine-3'-phosphate
  modified_base 7: mod_base = OTHER; note = 2'-fluoroadenosine-3'-phosphate
  modified_base 8: mod_base = OTHER; note = 2'-O-methylcytidine-3'-phosphate
  modified_base 9: mod_base = OTHER; note = 2'-fluoroguanosine-3'-phosphate
  modified_base 10: mod_base = OTHER; note = 2'-O-methyluridine-3'-phosphate
  modified_base 11: mod_base = OTHER; note = 2'-fluoroadenosine-3'-phosphate
  modified_base 12: mod_base = OTHER; note = 2'-O-methylcytidine-3'-phosphate
  modified_base 13: mod_base = OTHER; note = 2'-fluoroadenosine-3'-phosphate
  modified_base 14: mod_base = OTHER; note = 2'-O-methyladenosine-3'-phosphate
  modified_base 15: mod_base = OTHER; note = 2'-fluorocytidine-3'-phosphate
  modified_base 16: mod_base = OTHER; note = 2'-O-methyladenosine-3'-phosphate
  modified_base 17: mod_base = OTHER; note = 2'-fluorocytidine-3'-phosphate
  modified_base 18: mod_base = OTHER; note = 2'-O-methyladenosine-3'-phosphate
  modified_base 19: mod_base = OTHER; note = 2'-fluoroguanosine-3'-phosphate
  modified_base 20: mod_base = OTHER; note = 2'-O-methyladenosine-3'-phosphate
  modified_base 21: mod_base = OTHER; note = 2'-fluoroadenosine-3'-phosphorothioate
  modified_base 22: mod_base = OTHER; note = 2'-deoxythymidine-3'-phosphate
  modified_base 23: mod_base = OTHER; note = 2'-deoxythymidine-3'-phosphate
tcctgcacgtacaacacagaatt

SEQ ID NO: 124 - RNA, 23 nt, synthetic construct
  source 1..23: mol_type = other RNA
  modified_base 1: mod_base = OTHER; note = 2'-fluorocytidine-3'-phosphate
  modified_base 2: mod_base = OTHER; note = 2'-O-methylcytidine-3'-phosphate
  modified_base 3: mod_base = OTHER; note = 2'-fluorouridine-3'-phosphate
  modified_base 4: mod_base = OTHER; note = 2'-O-methylcytidine-3'-phosphate
  modified_base 5: mod_base = OTHER; note = 2'-fluoroadenosine-3'-phosphate
  modified_base 6: mod_base = OTHER; note = 2'-O-methyluridine-3'-phosphate
  modified_base 7: mod_base = OTHER; note = 2'-fluorocytidine-3'-phosphate
  modified_base 8: mod_base = OTHER; note = 2'-O-methyladenosine-3'-phosphate
  modified_base 9: mod_base = OTHER; note = 2'-fluoroadenosine-3'-phosphate
  modified_base 10: mod_base = OTHER; note = 2'-O-methylcytidine-3'-phosphate
  modified_base 11: mod_base = OTHER; note = 2'-fluoroadenosine-3'-phosphate
  modified_base 12: mod_base = OTHER; note = 2'-O-methylguanosine-3'-phosphate
  modified_base 13: mod_base = OTHER; note = 2'-fluoroguanosine-3'-phosphate
  modified_base 14: mod_base = OTHER; note = 2'-O-methyluridine-3'-phosphate
  modified_base 15: mod_base = OTHER; note = 2'-fluorouridine-3'-phosphate
  modified_base 16: mod_base = OTHER; note = 2'-O-methylcytidine-3'-phosphate
  modified_base 17: mod_base = OTHER; note = 2'-fluoroadenosine-3'-phosphate
  modified_base 18: mod_base = OTHER; note = 2'-O-methyladenosine-3'-phosphate
  modified_base 19: mod_base = OTHER; note = 2'-fluorocytidine-3'-phosphate
  modified_base 20: mod_base = OTHER; note = 2'-O-methyladenosine-3'-phosphate
  modified_base 21: mod_base = OTHER; note = 2'-fluoroadenosine-3'-phosphorothioate
  modified_base 22: mod_base = OTHER; note = 2'-deoxythymidine-3'-phosphate
  modified_base 23: mod_base = OTHER; note = 2'-deoxythymidine-3'-phosphate
cctcatcaacaggttcaacaatt

SEQ ID NO: 125 - RNA, 23 nt, synthetic construct
  source 1..23: mol_type = other RNA
  modified_base 1: mod_base = OTHER; note = 2'-fluorocytidine-3'-phosphate
  modified_base 2: mod_base = OTHER; note = 2'-O-methylcytidine-3'-phosphate
  modified_base 3: mod_base = OTHER; note = 2'-fluoroguanosine-3'-phosphate
  modified_base 4: mod_base = OTHER; note = 2'-O-methylcytidine-3'-phosphate
  modified_base 5: mod_base = OTHER; note = 2'-fluorouridine-3'-phosphate
  modified_base 6: mod_base = OTHER; note = 2'-O-methyluridine-3'-phosphate
  modified_base 7: mod_base = OTHER; note = 2'-fluorocytidine-3'-phosphate
  modified_base 8: mod_base = OTHER; note = 2'-O-methylcytidine-3'-phosphate
  modified_base 9: mod_base = OTHER; note = 2'-fluoroadenosine-3'-phosphate
  modified_base 10: mod_base = OTHER; note = 2'-O-methylguanosine-3'-phosphate
  modified_base 11: mod_base = OTHER; note = 2'-fluoroguanosine-3'-phosphate
  modified_base 12: mod_base = OTHER; note = 2'-O-methylguanosine-3'-phosphate
  modified_base 13: mod_base = OTHER; note = 2'-fluorouridine-3'-phosphate
  modified_base 14: mod_base = OTHER; note = 2'-O-methylguanosine-3'-phosphate
  modified_base 15: mod_base = OTHER; note = 2'-fluoroadenosine-3'-phosphate
  modified_base 16: mod_base = OTHER; note = 2'-O-methyladenosine-3'-phosphate
  modified_base 17: mod_base = OTHER; note = 2'-fluorouridine-3'-phosphate
  modified_base 18: mod_base = OTHER; note = 2'-O-methylguanosine-3'-phosphate
  modified_base 19: mod_base = OTHER; note = 2'-fluoroguanosine-3'-phosphate
  modified_base 20: mod_base = OTHER; note = 2'-O-methyladenosine-3'-phosphate
  modified_base 21: mod_base = OTHER; note = 2'-fluoroadenosine-3'-phosphorothioate
  modified_base 22: mod_base = OTHER; note = 2'-deoxythymidine-3'-phosphate
  modified_base 23: mod_base = OTHER; note = 2'-deoxythymidine-3'-phosphate
ccgcttccagggtgaatggaatt

SEQ ID NO: 126 - RNA, 23 nt, synthetic construct
  source 1..23: mol_type = other RNA
  modified_base 1: mod_base = OTHER; note = 2'-fluoroadenosine-3'-phosphate
  modified_base 2: mod_base = OTHER; note = 2'-O-methyladenosine-3'-phosphate
  modified_base 3: mod_base = OTHER; note = 2'-fluoroguanosine-3'-phosphate
  modified_base 4: mod_base = OTHER; note = 2'-O-methylguanosine-3'-phosphate
  modified_base 5: mod_base = OTHER; note = 2'-fluorouridine-3'-phosphate
  modified_base 6: mod_base = OTHER; note = 2'-O-methylcytidine-3'-phosphate
  modified_base 7: mod_base = OTHER; note = 2'-fluoroadenosine-3'-phosphate
  modified_base 8: mod_base = OTHER; note = 2'-O-methyluridine-3'-phosphate
  modified_base 9: mod_base = OTHER; note = 2'-fluorocytidine-3'-phosphate
  modified_base 10: mod_base = OTHER; note = 2'-O-methyluridine-3'-phosphate
  modified_base 11: mod_base = OTHER; note = 2'-fluorocytidine-3'-phosphate
  modified_base 12: mod_base = OTHER; note = 2'-O-methylcytidine-3'-phosphate
  modified_base 13: mod_base = OTHER; note = 2'-fluoroadenosine-3'-phosphate
  modified_base 14: mod_base = OTHER; note = 2'-O-methylcytidine-3'-phosphate
  modified_base 15: mod_base = OTHER; note = 2'-fluoroadenosine-3'-phosphate
  modified_base 16: mod_base = OTHER; note = 2'-O-methylcytidine-3'-phosphate
  modified_base 17: mod_base = OTHER; note = 2'-fluorouridine-3'-phosphate
  modified_base 18: mod_base = OTHER; note = 2'-O-methylguanosine-3'-phosphate
  modified_base 19: mod_base = OTHER; note = 2'-fluoroguanosine-3'-phosphate
  modified_base 20: mod_base = OTHER; note = 2'-O-methyladenosine-3'-phosphate
  modified_base 21: mod_base = OTHER; note = 2'-fluoroadenosine-3'-phosphorothioate
  modified_base 22: mod_base = OTHER; note = 2'-deoxythymidine-3'-phosphate
  modified_base 23: mod_base = OTHER; note = 2'-deoxythymidine-3'-phosphate
aaggtcatctccacactggaatt

SEQ ID NO: 127 - RNA, 23 nt, synthetic construct
  source 1..23: mol_type = other RNA
  modified_base 1: mod_base = OTHER; note = 2'-fluorocytidine-3'-phosphate
  modified_base 2: mod_base = OTHER; note = 2'-O-methylguanosine-3'-phosphate
  modified_base 3: mod_base = OTHER; note = 2'-fluoroadenosine-3'-phosphate
  modified_base 4: mod_base = OTHER; note = 2'-O-methylcytidine-3'-phosphate
  modified_base 5: mod_base = OTHER; note = 2'-fluorocytidine-3'-phosphate
  modified_base 6: mod_base = OTHER; note = 2'-O-methylguanosine-3'-phosphate
  modified_base 7: mod_base = OTHER; note = 2'-fluorouridine-3'-phosphate
  modified_base 8: mod_base = OTHER; note = 2'-O-methylguanosine-3'-phosphate
  modified_base 9: mod_base = OTHER; note = 2'-fluoroguanosine-3'-phosphate
  modified_base 10: mod_base = OTHER; note = 2'-O-methylcytidine-3'-phosphate
  modified_base 11: mod_base = OTHER; note = 2'-fluoroguanosine-3'-phosphate
  modified_base 12: mod_base = OTHER; note = 2'-O-methyladenosine-3'-phosphate
  modified_base 13: mod_base = OTHER; note = 2'-fluoroguanosine-3'-phosphate
  modified_base 14: mod_base = OTHER; note = 2'-O-methylcytidine-3'-phosphate
  modified_base 15: mod_base = OTHER; note = 2'-fluorouridine-3'-phosphate
  modified_base 16: mod_base = OTHER; note = 2'-O-methyluridine-3'-phosphate
  modified_base 17: mod_base = OTHER; note = 2'-fluoroguanosine-3'-phosphate
  modified_base 18: mod_base = OTHER; note = 2'-O-methyladenosine-3'-phosphate
  modified_base 19: mod_base = OTHER; note = 2'-fluoroguanosine-3'-phosphate
  modified_base 20: mod_base = OTHER; note = 2'-O-methyladenosine-3'-phosphate
  modified_base 21: mod_base = OTHER; note = 2'-fluoroadenosine-3'-phosphorothioate
  modified_base 22: mod_base = OTHER; note = 2'-O-methyluridine-3'-phosphorothioate
  modified_base 23: mod_base = OTHER; note = 2'-O-methyluridine-3'-phosphate
cgaccgtggcgagcttgagaatt

SEQ ID NO: 128 - RNA, 23 nt, synthetic construct
  source 1..23: mol_type = other RNA
  modified_base 1: mod_base = OTHER; note = 2'-fluorocytidine-3'-phosphate
  modified_base 2: mod_base = OTHER; note = 2'-O-methyladenosine-3'-phosphate
  modified_base 3: mod_base = OTHER; note = 2'-fluorocytidine-3'-phosphate
  modified_base 4: mod_base = OTHER; note = 2'-O-methylguanosine-3'-phosphate
  modified_base 5: mod_base = OTHER; note = 2'-fluorouridine-3'-phosphate
  modified_base 6: mod_base = OTHER; note = 2'-O-methyladenosine-3'-phosphate
  modified_base 7: mod_base = OTHER; note = 2'-fluorocytidine-3'-phosphate
  modified_base 8: mod_base = OTHER; note = 2'-O-methyluridine-3'-phosphate
  modified_base 9: mod_base = OTHER; note = 2'-fluoroguanosine-3'-phosphate
  modified_base 10: mod_base = OTHER; note = 2'-O-methylguanosine-3'-phosphate
  modified_base 11: mod_base = OTHER; note = 2'-fluorouridine-3'-phosphate
  modified_base 12: mod_base = OTHER; note = 2'-O-methylguanosine-3'-phosphate
  modified_base 13: mod_base = OTHER; note = 2'-fluorocytidine-3'-phosphate
  modified_base 14: mod_base = OTHER; note = 2'-O-methyluridine-3'-phosphate
  modified_base 15: mod_base = OTHER; note = 2'-fluoroadenosine-3'-phosphate
  modified_base 16: mod_base = OTHER; note = 2'-O-methylcytidine-3'-phosphate
  modified_base 17: mod_base = OTHER; note = 2'-fluoroadenosine-3'-phosphate
  modified_base 18: mod_base = OTHER; note = 2'-O-methyluridine-3'-phosphate
  modified_base 19: mod_base = OTHER; note = 2'-fluorouridine-3'-phosphate
  modified_base 20: mod_base = OTHER; note = 2'-O-methyladenosine-3'-phosphate
  modified_base 21: mod_base = OTHER; note = 2'-fluoroadenosine-3'-phosphorothioate
  modified_base 22: mod_base = OTHER; note = 2'-O-methyluridine-3'-phosphorothioate
  modified_base 23: mod_base = OTHER; note = 2'-O-methyluridine-3'-phosphate
cacgtactggtgctacattaatt

SEQ ID NO: 129 - RNA, 23 nt, synthetic construct
  source 1..23: mol_type = other RNA
  modified_base 1: mod_base = OTHER; note = 2'-fluorocytidine-3'-phosphate
  modified_base 2: mod_base = OTHER; note = 2'-O-methylcytidine-3'-phosphate
  modified_base 3: mod_base = OTHER; note = 2'-fluoroadenosine-3'-phosphate
  modified_base 4: mod_base = OTHER; note = 2'-O-methylguanosine-3'-phosphate
  modified_base 5: mod_base = OTHER; note = 2'-fluoroguanosine-3'-phosphate
  modified_base 6: mod_base = OTHER; note = 2'-O-methyladenosine-3'-phosphate
  modified_base 7: mod_base = OTHER; note = 2'-fluoroguanosine-3'-phosphate
  modified_base 8: mod_base = OTHER; note = 2'-O-methyladenosine-3'-phosphate
  modified_base 9: mod_base = OTHER; note = 2'-fluorouridine-3'-phosphate
  modified_base 10: mod_base = OTHER; note = 2'-O-methylcytidine-3'-phosphate
  modified_base 11: mod_base = OTHER; note = 2'-fluorocytidine-3'-phosphate
  modified_base 12: mod_base = OTHER; note = 2'-O-methylguanosine-3'-phosphate
  modified_base 13: mod_base = OTHER; note = 2'-fluorocytidine-3'-phosphate
  modified_base 14: mod_base = OTHER; note = 2'-O-methyladenosine-3'-phosphate
  modified_base 15: mod_base = OTHER; note = 2'-fluorouridine-3'-phosphate
  modified_base 16: mod_base = OTHER; note = 2'-O-methylguanosine-3'-phosphate
  modified_base 17: mod_base = OTHER; note = 2'-fluorouridine-3'-phosphate
  modified_base 18: mod_base = OTHER; note = 2'-O-methyluridine-3'-phosphate
  modified_base 19: mod_base = OTHER; note = 2'-fluoroguanosine-3'-phosphate
  modified_base 20: mod_base = OTHER; note = 2'-O-methyladenosine-3'-phosphate
  modified_base 21: mod_base = OTHER; note = 2'-fluoroadenosine-3'-phosphorothioate
  modified_base 22: mod_base = OTHER; note = 2'-O-methyluridine-3'-phosphorothioate
  modified_base 23: mod_base = OTHER; note = 2'-O-methyluridine-3'-phosphate
ccaggagatccgcatgttgaatt

SEQ ID NO: 130 - RNA, 23 nt, synthetic construct
  source 1..23: mol_type = other RNA
  modified_base 1: mod_base = OTHER; note = 2'-fluoroguanosine-3'-phosphate
  modified_base 2: mod_base = OTHER; note = 2'-O-methylguanosine-3'-phosphate
  modified_base 3: mod_base = OTHER; note = 2'-fluoroadenosine-3'-phosphate
  modified_base 4: mod_base = OTHER; note = 2'-O-methylguanosine-3'-phosphate
  modified_base 5: mod_base = OTHER; note = 2'-fluoroadenosine-3'-phosphate
  modified_base 6: mod_base = OTHER; note = 2'-O-methyluridine-3'-phosphate
  modified_base 7: mod_base = OTHER; note = 2'-fluorocytidine-3'-phosphate
  modified_base 8: mod_base = OTHER; note = 2'-O-methylcytidine-3'-phosphate
  modified_base 9: mod_base = OTHER; note = 2'-fluoroguanosine-3'-phosphate
  modified_base 10: mod_base = OTHER; note = 2'-O-methylcytidine-3'-phosphate
  modified_base 11: mod_base = OTHER; note = 2'-fluoroadenosine-3'-phosphate
  modified_base 12: mod_base = OTHER; note = 2'-O-methyluridine-3'-phosphate
  modified_base 13: mod_base = OTHER; note = 2'-fluoroguanosine-3'-phosphate
  modified_base 14: mod_base = OTHER; note = 2'-O-methyluridine-3'-phosphate
  modified_base 15: mod_base = OTHER; note = 2'-fluorouridine-3'-phosphate
  modified_base 16: mod_base = OTHER; note = 2'-O-methylguanosine-3'-phosphate
  modified_base 17: mod_base = OTHER; note = 2'-fluoroadenosine-3'-phosphate
  modified_base 18: mod_base = OTHER; note = 2'-O-methyladenosine-3'-phosphate
  modified_base 19: mod_base = OTHER; note = 2'-fluoroguanosine-3'-phosphate
  modified_base 20: mod_base = OTHER; note = 2'-O-methyladenosine-3'-phosphate
  modified_base 21: mod_base = OTHER; note = 2'-fluoroadenosine-3'-phosphorothioate
  modified_base 22: mod_base = OTHER; note = 2'-O-methyluridine-3'-phosphorothioate
  modified_base 23: mod_base = OTHER; note = 2'-O-methyluridine-3'-phosphate
ggagatccgcatgttgaagaatt

SEQ ID NO: 131 - RNA, 23 nt, synthetic construct
  source 1..23: mol_type = other RNA
  modified_base 1: mod_base = OTHER; note = 2'-fluorouridine-3'-phosphate
  modified_base 2: mod_base = OTHER; note = 2'-O-methylcytidine-3'-phosphate
  modified_base 3: mod_base = OTHER; note = 2'-fluorocytidine-3'-phosphate
  modified_base 4: mod_base = OTHER; note = 2'-O-methyluridine-3'-phosphate
  modified_base 5: mod_base = OTHER; note = 2'-fluoroguanosine-3'-phosphate
  modified_base 6: mod_base = OTHER; note = 2'-O-methylcytidine-3'-phosphate
  modified_base 7: mod_base = OTHER; note = 2'-fluoroadenosine-3'-phosphate
  modified_base 8: mod_base = OTHER; note = 2'-O-methylcytidine-3'-phosphate
  modified_base 9: mod_base = OTHER; note = 2'-fluoroguanosine-3'-phosphate
  modified_base 10: mod_base = OTHER; note = 2'-O-methyluridine-3'-phosphate
  modified_base 11: mod_base = OTHER; note = 2'-fluoroadenosine-3'-phosphate
  modified_base 12: mod_base = OTHER; note = 2'-O-methylcytidine-3'-phosphate
  modified_base 13: mod_base = OTHER; note = 2'-fluoroadenosine-3'-phosphate
  modified_base 14: mod_base = OTHER; note = 2'-O-methyladenosine-3'-phosphate
  modified_base 15: mod_base = OTHER; note = 2'-fluorocytidine-3'-phosphate
  modified_base 16: mod_base = OTHER; note = 2'-O-methyladenosine-3'-phosphate
  modified_base 17: mod_base = OTHER; note = 2'-fluorocytidine-3'-phosphate
  modified_base 18: mod_base = OTHER; note = 2'-O-methyladenosine-3'-phosphate
  modified_base 19: mod_base = OTHER; note = 2'-fluoroguanosine-3'-phosphate
  modified_base 20: mod_base = OTHER; note = 2'-O-methyladenosine-3'-phosphate
  modified_base 21: mod_base = OTHER; note = 2'-fluoroadenosine-3'-phosphorothioate
  modified_base 22: mod_base = OTHER; note = 2'-O-methyluridine-3'-phosphorothioate
  modified_base 23: mod_base = OTHER; note = 2'-O-methyluridine-3'-phosphate
tcctgcacgtacaacacagaatt

SEQ ID NO: 132 - RNA, 23 nt, synthetic construct
  source 1..23: mol_type = other RNA
  modified_base 1: mod_base = OTHER; note = 2'-fluorocytidine-3'-phosphate
  modified_base 2: mod_base = OTHER; note = 2'-O-methylcytidine-3'-phosphate
  modified_base 3: mod_base = OTHER; note = 2'-fluorouridine-3'-phosphate
  modified_base 4: mod_base = OTHER; note = 2'-O-methylcytidine-3'-phosphate
  modified_base 5: mod_base = OTHER; note = 2'-fluoroadenosine-3'-phosphate
  modified_base 6: mod_base = OTHER; note = 2'-O-methyluridine-3'-phosphate
  modified_base 7: mod_base = OTHER; note = 2'-fluorocytidine-3'-phosphate
  modified_base 8: mod_base = OTHER; note = 2'-O-methyladenosine-3'-phosphate
  modified_base 9: mod_base = OTHER; note = 2'-fluoroadenosine-3'-phosphate
  modified_base 10: mod_base = OTHER; note = 2'-O-methylcytidine-3'-phosphate
  modified_base 11: mod_base = OTHER; note = 2'-fluoroadenosine-3'-phosphate
  modified_base 12: mod_base = OTHER; note = 2'-O-methylguanosine-3'-phosphate
  modified_base 13: mod_base = OTHER; note = 2'-fluoroguanosine-3'-phosphate
  modified_base 14: mod_base = OTHER; note = 2'-O-methyluridine-3'-phosphate
  modified_base 15: mod_base = OTHER; note = 2'-fluorouridine-3'-phosphate
  modified_base 16: mod_base = OTHER; note = 2'-O-methylcytidine-3'-phosphate
  modified_base 17: mod_base = OTHER; note = 2'-fluoroadenosine-3'-phosphate
  modified_base 18: mod_base = OTHER; note = 2'-O-methyladenosine-3'-phosphate
  modified_base 19: mod_base = OTHER; note = 2'-fluorocytidine-3'-phosphate
  modified_base 20: mod_base = OTHER; note = 2'-O-methyladenosine-3'-phosphate
  modified_base 21: mod_base = OTHER; note = 2'-fluoroadenosine-3'-phosphorothioate
  modified_base 22: mod_base = OTHER; note = 2'-O-methyluridine-3'-phosphorothioate
  modified_base 23: mod_base = OTHER; note = 2'-O-methyluridine-3'-phosphate
cctcatcaacaggttcaacaatt

SEQ ID NO: 133 - RNA, 23 nt, synthetic construct
  source 1..23: mol_type = other RNA
  modified_base 1: mod_base = OTHER; note = 2'-fluorocytidine-3'-phosphate
  modified_base 2: mod_base = OTHER; note = 2'-O-methylcytidine-3'-phosphate
  modified_base 3: mod_base = OTHER; note = 2'-fluoroguanosine-3'-phosphate
  modified_base 4: mod_base = OTHER; note = 2'-O-methylcytidine-3'-phosphate
  modified_base 5: mod_base = OTHER; note = 2'-fluorouridine-3'-phosphate
  modified_base 6: mod_base = OTHER; note = 2'-O-methyluridine-3'-phosphate
  modified_base 7: mod_base = OTHER; note = 2'-fluorocytidine-3'-phosphate
  modified_base 8: mod_base = OTHER; note = 2'-O-methylcytidine-3'-phosphate
  modified_base 9: mod_base = OTHER; note = 2'-fluoroadenosine-3'-phosphate
  modified_base 10: mod_base = OTHER; note = 2'-O-methylguanosine-3'-phosphate
  modified_base 11: mod_base = OTHER; note = 2'-fluoroguanosine-3'-phosphate
  modified_base 12: mod_base = OTHER; note = 2'-O-methylguanosine-3'-phosphate
  modified_base 13: mod_base = OTHER; note = 2'-fluorouridine-3'-phosphate
  modified_base 14: mod_base = OTHER; note = 2'-O-methylguanosine-3'-phosphate
  modified_base 15: mod_base = OTHER; note = 2'-fluoroadenosine-3'-phosphate
  modified_base 16: mod_base = OTHER; note = 2'-O-methyladenosine-3'-phosphate
  modified_base 17: mod_base = OTHER; note = 2'-fluorouridine-3'-phosphate
  modified_base 18: mod_base = OTHER; note = 2'-O-methylguanosine-3'-phosphate
  modified_base 19: mod_base = OTHER; note = 2'-fluoroguanosine-3'-phosphate
  modified_base 20: mod_base = OTHER; note = 2'-O-methyladenosine-3'-phosphate
  modified_base 21: mod_base = OTHER; note = 2'-fluoroadenosine-3'-phosphorothioate
  modified_base 22: mod_base = OTHER; note = 2'-O-methyluridine-3'-phosphorothioate
  modified_base 23: mod_base = OTHER; note = 2'-O-methyluridine-3'-phosphate
ccgcttccagggtgaatggaatt

SEQ ID NO: 134 - RNA, 23 nt, synthetic construct
  source 1..23: mol_type = other RNA
  modified_base 1: mod_base = OTHER; note = 2'-fluoroadenosine-3'-phosphate
  modified_base 2: mod_base = OTHER; note = 2'-O-methyladenosine-3'-phosphate
  modified_base 3: mod_base = OTHER; note = 2'-fluoroguanosine-3'-phosphate
  modified_base 4: mod_base = OTHER; note = 2'-O-methylguanosine-3'-phosphate
  modified_base 5: mod_base = OTHER; note = 2'-fluorouridine-3'-phosphate
  modified_base 6: mod_base = OTHER; note = 2'-O-methylcytidine-3'-phosphate
  modified_base 7: mod_base = OTHER; note = 2'-fluoroadenosine-3'-phosphate
  modified_base 8: mod_base = OTHER; note = 2'-O-methyluridine-3'-phosphate
  modified_base 9: mod_base = OTHER; note = 2'-fluorocytidine-3'-phosphate
  modified_base 10: mod_base = OTHER; note = 2'-O-methyluridine-3'-phosphate
  modified_base 11: mod_base = OTHER; note = 2'-fluorocytidine-3'-phosphate
  modified_base 12: mod_base = OTHER; note = 2'-O-methylcytidine-3'-phosphate
  modified_base 13: mod_base = OTHER; note = 2'-fluoroadenosine-3'-phosphate
  modified_base 14: mod_base = OTHER; note = 2'-O-methylcytidine-3'-phosphate
  modified_base 15: mod_base = OTHER; note = 2'-fluoroadenosine-3'-phosphate
  modified_base 16: mod_base = OTHER; note = 2'-O-methylcytidine-3'-phosphate
  modified_base 17: mod_base = OTHER; note = 2'-fluorouridine-3'-phosphate
  modified_base 18: mod_base = OTHER; note = 2'-O-methylguanosine-3'-phosphate
  modified_base 19: mod_base = OTHER; note = 2'-fluoroguanosine-3'-phosphate
  modified_base 20: mod_base = OTHER; note = 2'-O-methyladenosine-3'-phosphate
  modified_base 21: mod_base = OTHER; note = 2'-fluoroadenosine-3'-phosphorothioate
  modified_base 22: mod_base = OTHER; note = 2'-O-methyluridine-3'-phosphorothioate
  modified_base 23: mod_base = OTHER; note = 2'-O-methyluridine-3'-phosphate
aaggtcatctccacactggaatt

SEQ ID NO: 135 - RNA, 23 nt, synthetic construct
  source 1..23: mol_type = other RNA
  modified_base 1: mod_base = OTHER; note = 2'-O-methylcytidine-3'-phosphorothioate
  modified_base 2: mod_base = OTHER; note = 2'-O-methylguanosine-3'-phosphorothioate
  modified_base 3: mod_base = OTHER; note = 2'-O-methyladenosine-3'-phosphate
  modified_base 4: mod_base = OTHER; note = 2'-O-methylcytidine-3'-phosphate
  modified_base 5: mod_base = OTHER; note = 2'-fluorocytidine-3'-phosphate
  modified_base 6: mod_base = OTHER; note = 2'-O-methylguanosine-3'-phosphate
  modified_base 7: mod_base = OTHER; note = 2'-fluorouridine-3'-phosphate
  modified_base 8: mod_base = OTHER; note = 2'-fluoroguanosine-3'-phosphate
  modified_base 9: mod_base = OTHER; note = 2'-fluoroguanosine-3'-phosphate
  modified_base 10: mod_base = OTHER; note = 2'-O-methylcytidine-3'-phosphate
  modified_base 11: mod_base = OTHER; note = 2'-O-methylguanosine-3'-phosphate
  modified_base 12: mod_base = OTHER; note = 2'-O-methyladenosine-3'-phosphate
  modified_base 13: mod_base = OTHER; note = 2'-O-methylguanosine-3'-phosphate
  modified_base 14: mod_base = OTHER; note = 2'-O-methylcytidine-3'-phosphate
  modified_base 15: mod_base = OTHER; note = 2'-O-methyluridine-3'-phosphate
  modified_base 16: mod_base = OTHER; note = 2'-O-methyluridine-3'-phosphate
  modified_base 17: mod_base = OTHER; note = 2'-O-methylguanosine-3'-phosphate
  modified_base 18: mod_base = OTHER; note = 2'-O-methyladenosine-3'-phosphate
  modified_base 19: mod_base = OTHER; note = 2'-O-methylguanosine-3'-phosphate
  modified_base 20: mod_base = OTHER; note = 2'-O-methyladenosine-3'-phosphate
  modified_base 21: mod_base = OTHER; note = 2'-O-methyladenosine-3'-phosphorothioate
  modified_base 22: mod_base = OTHER; note = 2'-O-methyluridine-3'-phosphorothioate
  modified_base 23: mod_base = OTHER; note = 2'-O-methyluridine-3'-phosphate
cgaccgtggcgagcttgagaatt

SEQ ID NO: 136 - RNA, 23 nt, synthetic construct
  source 1..23: mol_type = other RNA
  modified_base 1: mod_base = OTHER; note = 2'-O-methylcytidine-3'-phosphorothioate
  modified_base 2: mod_base = OTHER; note = 2'-O-methyladenosine-3'-phosphorothioate
  modified_base 3: mod_base = OTHER; note = 2'-O-methylcytidine-3'-phosphate
  modified_base 4: mod_base = OTHER; note = 2'-O-methylguanosine-3'-phosphate
  modified_base 5: mod_base = OTHER; note = 2'-fluorouridine-3'-phosphate
  modified_base 6: mod_base = OTHER; note = 2'-O-methyladenosine-3'-phosphate
  modified_base 7: mod_base = OTHER; note = 2'-fluorocytidine-3'-phosphate
  modified_base 8: mod_base = OTHER; note = 2'-fluorouridine-3'-phosphate
  modified_base 9: mod_base = OTHER; note = 2'-fluoroguanosine-3'-phosphate
  modified_base 10: mod_base = OTHER; note = 2'-O-methylguanosine-3'-phosphate
  modified_base 11: mod_base = OTHER; note = 2'-O-methyluridine-3'-phosphate
  modified_base 12: mod_base = OTHER; note = 2'-O-methylguanosine-3'-phosphate
  modified_base 13: mod_base = OTHER; note = 2'-O-methylcytidine-3'-phosphate
  modified_base 14: mod_base = OTHER; note = 2'-O-methyluridine-3'-phosphate
  modified_base 15: mod_base = OTHER; note = 2'-O-methyladenosine-3'-phosphate
  modified_base 16: mod_base = OTHER; note = 2'-O-methylcytidine-3'-phosphate
  modified_base 17: mod_base = OTHER; note = 2'-O-methyladenosine-3'-phosphate
  modified_base 18: mod_base = OTHER; note = 2'-O-methyluridine-3'-phosphate
  modified_base 19: mod_base = OTHER; note = 2'-O-methyluridine-3'-phosphate
  modified_base 20: mod_base = OTHER; note = 2'-O-methyladenosine-3'-phosphate
  modified_base 21: mod_base = OTHER; note = 2'-O-methyladenosine-3'-phosphorothioate
  modified_base 22: mod_base = OTHER; note = 2'-O-methyluridine-3'-phosphorothioate
  modified_base 23: mod_base = OTHER; note = 2'-O-methyluridine-3'-phosphate
cacgtactggtgctacattaatt

SEQ ID NO: 137 - RNA, 23 nt, synthetic construct
  source 1..23: mol_type = other RNA
  modified_base 1: mod_base = OTHER; note = 2'-O-methylcytidine-3'-phosphorothioate
  modified_base 2: mod_base = OTHER; note = 2'-O-methylcytidine-3'-phosphorothioate
  modified_base 3: mod_base = OTHER; note = 2'-O-methyladenosine-3'-phosphate
  modified_base 4: mod_base = OTHER; note = 2'-O-methylguanosine-3'-phosphate
  modified_base 5: mod_base = OTHER; note = 2'-fluoroguanosine-3'-phosphate
  modified_base 6: mod_base = OTHER; note = 2'-O-methyladenosine-3'-phosphate
  modified_base 7: mod_base = OTHER; note = 2'-fluoroguanosine-3'-phosphate
  modified_base 8: mod_base = OTHER; note = 2'-fluoroadenosine-3'-phosphate
  modified_base 9: mod_base = OTHER; note = 2'-fluorouridine-3'-phosphate
  modified_base 10: mod_base = OTHER; note = 2'-O-methylcytidine-3'-phosphate
  modified_base 11: mod_base = OTHER; note = 2'-O-methylcytidine-3'-phosphate
  modified_base 12: mod_base = OTHER; note = 2'-O-methylguanosine-3'-phosphate
  modified_base 13: mod_base = OTHER; note = 2'-O-methylcytidine-3'-phosphate
  modified_base 14: mod_base = OTHER; note = 2'-O-methyladenosine-3'-phosphate
  modified_base 15: mod_base = OTHER; note = 2'-O-methyluridine-3'-phosphate
  modified_base 16: mod_base = OTHER; note = 2'-O-methylguanosine-3'-phosphate
  modified_base 17: mod_base = OTHER; note = 2'-O-methyluridine-3'-phosphate
  modified_base 18: mod_base = OTHER; note = 2'-O-methyluridine-3'-phosphate
  modified_base 19: mod_base = OTHER; note = 2'-O-methylguanosine-3'-phosphate
  modified_base 20: mod_base = OTHER; note = 2'-O-methyladenosine-3'-phosphate
  modified_base 21: mod_base = OTHER; note = 2'-O-methyladenosine-3'-phosphorothioate
  modified_base 22: mod_base = OTHER; note = 2'-O-methyluridine-3'-phosphorothioate
  modified_base 23: mod_base = OTHER; note = 2'-O-methyluridine-3'-phosphate
ccaggagatccgcatgttgaatt

SEQ ID NO: 138 - RNA, 23 nt, synthetic construct
  source 1..23: mol_type = other RNA
  modified_base 1: mod_base = OTHER; note = 2'-O-methylguanosine-3'-phosphorothioate
  modified_base 2: mod_base = OTHER; note = 2'-O-methylguanosine-3'-phosphorothioate
  modified_base 3: mod_base = OTHER; note = 2'-O-methyladenosine-3'-phosphate
  modified_base 4: mod_base = OTHER; note = 2'-O-methylguanosine-3'-phosphate
  modified_base 5: mod_base = OTHER; note = 2'-fluoroadenosine-3'-phosphate
  modified_base 6: mod_base = OTHER; note = 2'-O-methyluridine-3'-phosphate
  modified_base 7: mod_base = OTHER; note = 2'-fluorocytidine-3'-phosphate
  modified_base 8: mod_base = OTHER; note = 2'-fluorocytidine-3'-phosphate
  modified_base 9: mod_base = OTHER; note = 2'-fluoroguanosine-3'-phosphate
  modified_base 10: mod_base = OTHER; note = 2'-O-methylcytidine-3'-phosphate
  modified_base 11: mod_base = OTHER; note = 2'-O-methyladenosine-3'-phosphate
  modified_base 12: mod_base = OTHER; note = 2'-O-methyluridine-3'-phosphate
  modified_base 13: mod_base = OTHER; note = 2'-O-methylguanosine-3'-phosphate
  modified_base 14: mod_base = OTHER; note = 2'-O-methyluridine-3'-phosphate
  modified_base 15: mod_base = OTHER; note = 2'-O-methyluridine-3'-phosphate
  modified_base 16: mod_base = OTHER; note = 2'-O-methylguanosine-3'-phosphate
  modified_base 17: mod_base = OTHER; note = 2'-O-methyladenosine-3'-phosphate
  modified_base 18: mod_base = OTHER; note = 2'-O-methyladenosine-3'-phosphate
  modified_base 19: mod_base = OTHER; note = 2'-O-methylguanosine-3'-phosphate
  modified_base 20: mod_base = OTHER; note = 2'-O-methyladenosine-3'-phosphate
  modified_base 21: mod_base = OTHER; note = 2'-O-methyladenosine-3'-phosphorothioate
  modified_base 22: mod_base = OTHER; note = 2'-O-methyluridine-3'-phosphorothioate
  modified_base 23: mod_base = OTHER; note = 2'-O-methyluridine-3'-phosphate
ggagatccgcatgttgaagaatt

SEQ ID NO: 139 - RNA, 23 nt, synthetic construct
  source 1..23: mol_type = other RNA
  modified_base 1: mod_base = OTHER; note = 2'-O-methyluridine-3'-phosphorothioate
  modified_base 2: mod_base = OTHER; note = 2'-O-methylcytidine-3'-phosphorothioate
  modified_base 3: mod_base = OTHER; note = 2'-O-methylcytidine-3'-phosphate
  modified_base 4: mod_base = OTHER; note = 2'-O-methyluridine-3'-phosphate
  modified_base 5: mod_base = OTHER; note = 2'-fluoroguanosine-3'-phosphate
  modified_base 6: mod_base = OTHER; note = 2'-O-methylcytidine-3'-phosphate
  modified_base 7: mod_base = OTHER; note = 2'-fluoroadenosine-3'-phosphate
  modified_base 8: mod_base = OTHER; note = 2'-fluorocytidine-3'-phosphate
  modified_base 9: mod_base = OTHER; note = 2'-fluoroguanosine-3'-phosphate
  modified_base 10: mod_base = OTHER; note = 2'-O-methyluridine-3'-phosphate
  modified_base 11: mod_base = OTHER; note = 2'-O-methyladenosine-3'-phosphate
  modified_base 12: mod_base = OTHER; note = 2'-O-methylcytidine-3'-phosphate
  modified_base 13: mod_base = OTHER; note = 2'-O-methyladenosine-3'-phosphate
  modified_base 14: mod_base = OTHER; note = 2'-O-methyladenosine-3'-phosphate
  modified_base 15: mod_base = OTHER; note = 2'-O-methylcytidine-3'-phosphate
  modified_base 16: mod_base = OTHER; note = 2'-O-methyladenosine-3'-phosphate
  modified_base 17: mod_base = OTHER; note = 2'-O-methylcytidine-3'-phosphate
  modified_base 18: mod_base = OTHER; note = 2'-O-methyladenosine-3'-phosphate
  modified_base 19: mod_base = OTHER; note = 2'-O-methylguanosine-3'-phosphate
  modified_base 20: mod_base = OTHER; note = 2'-O-methyladenosine-3'-phosphate
  modified_base 21: mod_base = OTHER; note = 2'-O-methyladenosine-3'-phosphorothioate
  modified_base 22: mod_base = OTHER; note = 2'-O-methyluridine-3'-phosphorothioate
  modified_base 23: mod_base = OTHER; note = 2'-O-methyluridine-3'-phosphate
tcctgcacgtacaacacagaatt

SEQ ID NO: 140 - RNA, 23 nt, synthetic construct
  source 1..23: mol_type = other RNA
  modified_base 1: mod_base = OTHER; note = 2'-O-methylcytidine-3'-phosphorothioate
  modified_base 2: mod_base = OTHER; note = 2'-O-methylcytidine-3'-phosphorothioate
  modified_base 3: mod_base = OTHER; note = 2'-O-methyluridine-3'-phosphate
  modified_base 4: mod_base = OTHER; note = 2'-O-methylcytidine-3'-phosphate
  modified_base 5: mod_base = OTHER; note = 2'-fluoroadenosine-3'-phosphate
  modified_base 6: mod_base = OTHER; note = 2'-O-methyluridine-3'-phosphate
  modified_base 7: mod_base = OTHER; note = 2'-fluorocytidine-3'-phosphate
  modified_base 8: mod_base = OTHER; note = 2'-fluoroadenosine-3'-phosphate
  modified_base 9: mod_base = OTHER; note = 2'-fluoroadenosine-3'-phosphate
  modified_base 10: mod_base = OTHER; note = 2'-O-methylcytidine-3'-phosphate
  modified_base 11: mod_base = OTHER; note = 2'-O-methyladenosine-3'-phosphate
  modified_base 12: mod_base = OTHER; note = 2'-O-methylguanosine-3'-phosphate
  modified_base 13: mod_base = OTHER; note = 2'-O-methylguanosine-3'-phosphate
  modified_base 14: mod_base = OTHER; note = 2'-O-methyluridine-3'-phosphate
  modified_base 15: mod_base = OTHER; note = 2'-O-methyluridine-3'-phosphate
  modified_base 16: mod_base = OTHER; note = 2'-O-methylcytidine-3'-phosphate
  modified_base 17: mod_base = OTHER; note = 2'-O-methyladenosine-3'-phosphate
  modified_base 18: mod_base = OTHER; note = 2'-O-methyladenosine-3'-phosphate
  modified_base 19: mod_base = OTHER; note = 2'-O-methylcytidine-3'-phosphate
  modified_base 20: mod_base = OTHER; note = 2'-O-methyladenosine-3'-phosphate
  modified_base 21: mod_base = OTHER; note = 2'-O-methyladenosine-3'-phosphorothioate
  modified_base 22: mod_base = OTHER; note = 2'-O-methyluridine-3'-phosphorothioate
  modified_base 23: mod_base = OTHER; note = 2'-O-methyluridine-3'-phosphate
cctcatcaacaggttcaacaatt

SEQ ID NO: 141 - RNA, 23 nt, synthetic construct
  source 1..23: mol_type = other RNA
  modified_base 1: mod_base = OTHER; note = 2'-O-methylcytidine-3'-phosphorothioate
  modified_base 2: mod_base = OTHER; note = 2'-O-methylcytidine-3'-phosphorothioate
  modified_base 3: mod_base = OTHER; note = 2'-O-methylguanosine-3'-phosphate
  modified_base 4: mod_base = OTHER; note = 2'-O-methylcytidine-3'-phosphate
  modified_base 5: mod_base = OTHER; note = 2'-fluorouridine-3'-phosphate
  modified_base 6: mod_base = OTHER; note = 2'-O-methyluridine-3'-phosphate
  modified_base 7: mod_base = OTHER; note = 2'-fluorocytidine-3'-phosphate
  modified_base 8: mod_base = OTHER; note = 2'-fluorocytidine-3'-phosphate
  modified_base 9: mod_base = OTHER; note = 2'-fluoroadenosine-3'-phosphate
  modified_base 10: mod_base = OTHER; note = 2'-O-methylguanosine-3'-phosphate
  modified_base 11: mod_base = OTHER; note = 2'-O-methylguanosine-3'-phosphate
  modified_base 12: mod_base = OTHER; note = 2'-O-methylguanosine-3'-phosphate
  modified_base 13: mod_base = OTHER; note = 2'-O-methyluridine-3'-phosphate
  modified_base 14: mod_base = OTHER; note = 2'-O-methylguanosine-3'-phosphate
  modified_base 15: mod_base = OTHER; note = 2'-O-methyladenosine-3'-phosphate
  modified_base 16: mod_base = OTHER; note = 2'-O-methyladenosine-3'-phosphate
  modified_base 17: mod_base = OTHER; note = 2'-O-methyluridine-3'-phosphate
  modified_base 18: mod_base = OTHER; note = 2'-O-methylguanosine-3'-phosphate
  modified_base 19: mod_base = OTHER; note = 2'-O-methylguanosine-3'-phosphate
  modified_base 20: mod_base = OTHER; note = 2'-O-methyladenosine-3'-phosphate
  modified_base 21: mod_base = OTHER; note = 2'-O-methyladenosine-3'-phosphorothioate
  modified_base 22: mod_base = OTHER; note = 2'-O-methyluridine-3'-phosphorothioate
  modified_base 23: mod_base = OTHER; note = 2'-O-methyluridine-3'-phosphate
ccgcttccagggtgaatggaatt

SEQ ID NO: 142 - RNA, 23 nt, synthetic construct
  source 1..23: mol_type = other RNA
  modified_base 1: mod_base = OTHER; note = 2'-O-methyladenosine-3'-phosphorothioate
  modified_base 2: mod_base = OTHER; note = 2'-O-methyladenosine-3'-phosphorothioate
  modified_base 3: mod_base = OTHER; note = 2'-O-methylguanosine-3'-phosphate
  modified_base 4: mod_base = OTHER; note = 2'-O-methylguanosine-3'-phosphate
  modified_base 5: mod_base = OTHER; note = 2'-fluorouridine-3'-phosphate
  modified_base 6: mod_base = OTHER; note = 2'-O-methylcytidine-3'-phosphate
  modified_base 7: mod_base = OTHER; note = 2'-fluoroadenosine-3'-phosphate
  modified_base 8: mod_base = OTHER; note = 2'-fluorouridine-3'-phosphate
  modified_base 9: mod_base = OTHER; note = 2'-fluorocytidine-3'-phosphate
  modified_base 10: mod_base = OTHER; note = 2'-O-methyluridine-3'-phosphate
  modified_base 11: mod_base = OTHER; note = 2'-O-methylcytidine-3'-phosphate
  modified_base 12: mod_base = OTHER; note = 2'-O-methylcytidine-3'-phosphate
  modified_base 13: mod_base = OTHER; note = 2'-O-methyladenosine-3'-phosphate
  modified_base 14: mod_base = OTHER; note = 2'-O-methylcytidine-3'-phosphate
  modified_base 15: mod_base = OTHER; note = 2'-O-methyladenosine-3'-phosphate
  modified_base 16: mod_base = OTHER; note = 2'-O-methylcytidine-3'-phosphate
  modified_base 17: mod_base = OTHER; note = 2'-O-methyluridine-3'-phosphate
  modified_base 18: mod_base = OTHER; note = 2'-O-methylguanosine-3'-phosphate
  modified_base 19: mod_base = OTHER; note = 2'-O-methylguanosine-3'-phosphate
  modified_base 20: mod_base = OTHER; note = 2'-O-methyladenosine-3'-phosphate
  modified_base 21: mod_base = OTHER; note = 2'-O-methyladenosine-3'-phosphorothioate
  modified_base 22: mod_base = OTHER; note = 2'-O-methyluridine-3'-phosphorothioate
  modified_base 23: mod_base = OTHER; note = 2'-O-methyluridine-3'-phosphate
aaggtcatctccacactggaatt

SEQ ID NO: 143 - RNA, 23 nt, synthetic construct
  source 1..23: mol_type = other RNA
  modified_base 1: mod_base = OTHER; note = 2'-O-methyluridine-3'-phosphorothioate
  modified_base 2: mod_base = OTHER; note = 2'-fluorouridine-3'-phosphorothioate
  modified_base 3: mod_base = OTHER; note = 2'-O-methylcytidine-3'-phosphate
  modified_base 4: mod_base = OTHER; note = 2'-fluorouridine-3'-phosphate
  modified_base 5: mod_base = OTHER; note = 2'-O-methylcytidine-3'-phosphate
  modified_base 6: mod_base = OTHER; note = 2'-fluoroadenosine-3'-phosphate
  modified_base 7: mod_base = OTHER; note = 2'-O-methyladenosine-3'-phosphate
  modified_base 8: mod_base = OTHER; note = 2'-fluoroguanosine-3'-phosphate
  modified_base 9: mod_base = OTHER; note = 2'-O-methylcytidine-3'-phosphate
  modified_base 10: mod_base = OTHER; note = 2'-fluorouridine-3'-phosphate
  modified_base 11: mod_base = OTHER; note = 2'-O-methylcytidine-3'-phosphate
  modified_base 12: mod_base = OTHER; note = 2'-fluoroguanosine-3'-phosphate
  modified_base 13: mod_base = OTHER; note = 2'-O-methylcytidine-3'-phosphate
  modified_base 14: mod_base = OTHER; note = 2'-fluorocytidine-3'-phosphate
  modified_base 15: mod_base = OTHER; note = 2'-O-methyladenosine-3'-phosphate
  modified_base 16: mod_base = OTHER; note = 2'-fluorocytidine-3'-phosphate
  modified_base 17: mod_base = OTHER; note = 2'-O-methylguanosine-3'-phosphate
  modified_base 18: mod_base = OTHER; note = 2'-fluoroguanosine-3'-phosphate
  modified_base 19: mod_base = OTHER; note = 2'-O-methyluridine-3'-phosphate
  modified_base 20: mod_base = OTHER; note = 2'-fluorocytidine-3'-phosphate
  modified_base 21: mod_base = OTHER; note = 2'-O-methylguanosine-3'-phosphorothioate
  modified_base 22: mod_base = OTHER; note = 2'-deoxythymidine-3'-phosphate
  modified_base 23: mod_base = OTHER; note = 2'-deoxythymidine-3'-phosphate
ttctcaagctcgccacggtcgtt

SEQ ID NO: 144 - RNA, 23 nt, synthetic construct
  source 1..23: mol_type = other RNA
  modified_base 1: mod_base = OTHER; note = 2'-O-methyluridine-3'-phosphorothioate
  modified_base 2: mod_base = OTHER; note = 2'-fluorouridine-3'-phosphorothioate
  modified_base 3: mod_base = OTHER; note = 2'-O-methyladenosine-3'-phosphate
  modified_base 4: mod_base = OTHER; note = 2'-fluoroadenosine-3'-phosphate
  modified_base 5: mod_base = OTHER; note = 2'-O-methyluridine-3'-phosphate
  modified_base 6: mod_base = OTHER; note = 2'-fluoroguanosine-3'-phosphate
  modified_base 7: mod_base = OTHER; note = 2'-O-methyluridine-3'-phosphate
  modified_base 8: mod_base = OTHER; note = 2'-fluoroadenosine-3'-phosphate
  modified_base 9: mod_base = OTHER; note = 2'-O-methylguanosine-3'-phosphate
  modified_base 10: mod_base = OTHER; note = 2'-fluorocytidine-3'-phosphate
  modified_base 11: mod_base = OTHER; note = 2'-O-methyladenosine-3'-phosphate
  modified_base 12: mod_base = OTHER; note = 2'-fluorocytidine-3'-phosphate
  modified_base 13: mod_base = OTHER; note = 2'-O-methylcytidine-3'-phosphate
  modified_base 14: mod_base = OTHER; note = 2'-fluoroadenosine-3'-phosphate
  modified_base 15: mod_base = OTHER; note = 2'-O-methylguanosine-3'-phosphate
  modified_base 16: mod_base = OTHER; note = 2'-fluorouridine-3'-phosphate
  modified_base 17: mod_base = OTHER; note = 2'-O-methyladenosine-3'-phosphate
  modified_base 18: mod_base = OTHER; note = 2'-fluorocytidine-3'-phosphate
  modified_base 19: mod_base = OTHER; note = 2'-O-methylguanosine-3'-phosphate
  modified_base 20: mod_base = OTHER; note = 2'-fluorouridine-3'-phosphate
  modified_base 21: mod_base = OTHER; note = 2'-O-methylguanosine-3'-phosphorothioate
  modified_base 22: mod_base = OTHER; note = 2'-deoxythymidine-3'-phosphate
  modified_base 23: mod_base = OTHER; note = 2'-deoxythymidine-3'-phosphate
ttaatgtagcaccagtacgtgtt

SEQ ID NO: 145 - RNA, 23 nt, synthetic construct
  source 1..23: mol_type = other RNA
  modified_base 1: mod_base = OTHER; note = 2'-O-methyluridine-3'-phosphorothioate
  modified_base 2: mod_base = OTHER; note = 2'-fluorouridine-3'-phosphorothioate
  modified_base 3: mod_base = OTHER; note = 2'-O-methylcytidine-3'-phosphate
  modified_base 4: mod_base = OTHER; note = 2'-fluoroadenosine-3'-phosphate
  modified_base 5: mod_base = OTHER; note = 2'-O-methyladenosine-3'-phosphate
  modified_base 6: mod_base = OTHER; note = 2'-fluorocytidine-3'-phosphate
  modified_base 7: mod_base = OTHER; note = 2'-O-methyladenosine-3'-phosphate
  modified_base 8: mod_base = OTHER; note = 2'-fluorouridine-3'-phosphate
  modified_base 9: mod_base = OTHER; note = 2'-O-methylguanosine-3'-phosphate
  modified_base 10: mod_base = OTHER; note = 2'-fluorocytidine-3'-phosphate
  modified_base 11: mod_base = OTHER; note = 2'-O-methylguanosine-3'-phosphate
  modified_base 12: mod_base = OTHER; note = 2'-fluoroguanosine-3'-phosphate
  modified_base 13: mod_base = OTHER; note = 2'-O-methyladenosine-3'-phosphate
  modified_base 14: mod_base = OTHER; note = 2'-fluorouridine-3'-phosphate
  modified_base 15: mod_base = OTHER; note = 2'-O-methylcytidine-3'-phosphate
  modified_base 16: mod_base = OTHER; note = 2'-fluorouridine-3'-phosphate
  modified_base 17: mod_base = OTHER; note = 2'-O-methylcytidine-3'-phosphate
  modified_base 18: mod_base = OTHER; note = 2'-fluorocytidine-3'-phosphate
  modified_base 19: mod_base = OTHER; note = 2'-O-methyluridine-3'-phosphate
  modified_base 20: mod_base = OTHER; note = 2'-fluoroguanosine-3'-phosphate
  modified_base 21: mod_base = OTHER; note = 2'-O-methylguanosine-3'-phosphorothioate
  modified_base 22: mod_base = OTHER; note = 2'-deoxythymidine-3'-phosphate
  modified_base 23: mod_base = OTHER; note = 2'-deoxythymidine-3'-phosphate
ttcaacatgcggatctcctggtt

SEQ ID NO: 146 - RNA, 23 nt, synthetic construct
  source 1..23: mol_type = other RNA
  modified_base 1: mod_base = OTHER; note = 2'-O-methyluridine-3'-phosphorothioate
  modified_base 2: mod_base = OTHER; note = 2'-fluorouridine-3'-phosphorothioate
  modified_base 3: mod_base = OTHER; note = 2'-O-methylcytidine-3'-phosphate
  modified_base 4: mod_base = OTHER; note = 2'-fluorouridine-3'-phosphate
  modified_base 5: mod_base = OTHER; note = 2'-O-methyluridine-3'-phosphate
  modified_base 6: mod_base = OTHER; note = 2'-fluorocytidine-3'-phosphate
  modified_base 7: mod_base = OTHER; note = 2'-O-methyladenosine-3'-phosphate
  modified_base 8: mod_base = OTHER; note = 2'-fluoroadenosine-3'-phosphate
  modified_base 9: mod_base = OTHER; note = 2'-O-methylcytidine-3'-phosphate
  modified_base 10: mod_base = OTHER; note = 2'-fluoroadenosine-3'-phosphate
  modified_base 11: mod_base = OTHER; note = 2'-O-methyluridine-3'-phosphate
  modified_base 12: mod_base = OTHER; note = 2'-fluoroguanosine-3'-phosphate
  modified_base 13: mod_base = OTHER; note = 2'-O-methylcytidine-3'-phosphate
  modified_base 14: mod_base = OTHER; note = 2'-fluoroguanosine-3'-phosphate
  modified_base 15: mod_base = OTHER; note = 2'-O-methylguanosine-3'-phosphate
  modified_base 16: mod_base = OTHER; note = 2'-fluoroadenosine-3'-phosphate
  modified_base 17: mod_base = OTHER; note = 2'-O-methyluridine-3'-phosphate
  modified_base 18: mod_base = OTHER; note = 2'-fluorocytidine-3'-phosphate
  modified_base 19: mod_base = OTHER; note = 2'-O-methyluridine-3'-phosphate
  modified_base 20: mod_base = OTHER; note = 2'-fluorocytidine-3'-phosphate
  modified_base 21: mod_base = OTHER; note = 2'-O-methylcytidine-3'-phosphorothioate
  modified_base 22: mod_base = OTHER; note = 2'-deoxythymidine-3'-phosphate
  modified_base 23: mod_base = OTHER; note = 2'-deoxythymidine-3'-phosphate
ttcttcaacatgcggatctcctt

SEQ ID NO: 147 - RNA, 23 nt, synthetic construct
  source 1..23: mol_type = other RNA
  modified_base 1: mod_base = OTHER; note = 2'-O-methyluridine-3'-phosphorothioate
  modified_base 2: mod_base = OTHER; note = 2'-fluorouridine-3'-phosphorothioate
  modified_base 3: mod_base = OTHER; note = 2'-O-methylcytidine-3'-phosphate
  modified_base 4: mod_base = OTHER; note = 2'-fluorouridine-3'-phosphate
  modified_base 5: mod_base = OTHER; note = 2'-O-methylguanosine-3'-phosphate
  modified_base 6: mod_base = OTHER; note = 2'-fluorouridine-3'-phosphate
  modified_base 7: mod_base = OTHER; note = 2'-O-methylguanosine-3'-phosphate
  modified_base 8: mod_base = OTHER; note = 2'-fluorouridine-3'-phosphate
  modified_base 9: mod_base = OTHER; note = 2'-O-methyluridine-3'-phosphate
  modified_base 10: mod_base = OTHER; note = 2'-fluoroguanosine-3'-phosphate
  modified_base 11: mod_base = OTHER; note = 2'-O-methyluridine-3'-phosphate
  modified_base 12: mod_base = OTHER; note = 2'-fluoroadenosine-3'-phosphate
  modified_base 13: mod_base = OTHER; note = 2'-O-methylcytidine-3'-phosphate
  modified_base 14: mod_base = OTHER; note = 2'-fluoroguanosine-3'-phosphate
  modified_base 15: mod_base = OTHER; note = 2'-O-methyluridine-3'-phosphate
  modified_base 16: mod_base = OTHER; note = 2'-fluoroguanosine-3'-phosphate
  modified_base 17: mod_base = OTHER; note = 2'-O-methylcytidine-3'-phosphate
  modified_base 18: mod_base = OTHER; note = 2'-fluoroadenosine-3'-phosphate
  modified_base 19: mod_base = OTHER; note = 2'-O-methylguanosine-3'-phosphate
  modified_base 20: mod_base = OTHER; note = 2'-fluoroguanosine-3'-phosphate
  modified_base 21: mod_base = OTHER; note = 2'-O-methyladenosine-3'-phosphorothioate
  modified_base 22: mod_base = OTHER; note = 2'-deoxythymidine-3'-phosphate
  modified_base 23: mod_base = OTHER; note = 2'-deoxythymidine-3'-phosphate
ttctgtgttgtacgtgcaggatt

SEQ ID NO: 148 - RNA, 23 nt, synthetic construct
  source 1..23: mol_type = other RNA
  modified_base 1: mod_base = OTHER; note = 2'-O-methyluridine-3'-phosphorothioate
  modified_base 2: mod_base = OTHER; note = 2'-fluorouridine-3'-phosphorothioate
  modified_base 3: mod_base = OTHER; note = 2'-O-methylguanosine-3'-phosphate
  modified_base 4: mod_base = OTHER; note = 2'-fluorouridine-3'-phosphate
  modified_base 5: mod_base = OTHER; note = 2'-O-methyluridine-3'-phosphate
  modified_base 6: mod_base = OTHER; note = 2'-fluoroguanosine-3'-phosphate
  modified_base 7: mod_base = OTHER; note = 2'-O-methyladenosine-3'-phosphate
  modified_base 8: mod_base = OTHER; note = 2'-fluoroadenosine-3'-phosphate
  modified_base 9: mod_base = OTHER; note = 2'-O-methylcytidine-3'-phosphate
  modified_base 10: mod_base = OTHER; note = 2'-fluorocytidine-3'-phosphate
  modified_base 11: mod_base = OTHER; note = 2'-O-methyluridine-3'-phosphate
  modified_base 12: mod_base = OTHER; note = 2'-fluoroguanosine-3'-phosphate
  modified_base 13: mod_base = OTHER; note = 2'-O-methyluridine-3'-phosphate
  modified_base 14: mod_base = OTHER; note = 2'-fluorouridine-3'-phosphate
  modified_base 15: mod_base = OTHER; note = 2'-O-methylguanosine-3'-phosphate
  modified_base 16: mod_base = OTHER; note = 2'-fluoroadenosine-3'-phosphate
  modified_base 17: mod_base = OTHER; note = 2'-O-methyluridine-3'-phosphate
  modified_base 18: mod_base = OTHER; note = 2'-fluoroguanosine-3'-phosphate
  modified_base 19: mod_base = OTHER; note = 2'-O-methyladenosine-3'-phosphate
  modified_base 20: mod_base = OTHER; note = 2'-fluoroguanosine-3'-phosphate
  modified_base 21: mod_base = OTHER; note = 2'-O-methylguanosine-3'-phosphorothioate
  modified_base 22: mod_base = OTHER; note = 2'-deoxythymidine-3'-phosphate
  modified_base 23: mod_base = OTHER; note = 2'-deoxythymidine-3'-phosphate
ttgttgaacctgttgatgaggtt

SEQ ID NO: 149 - RNA, 23 nt, synthetic construct
  source 1..23: mol_type = other RNA
  modified_base 1: mod_base = OTHER; note = 2'-O-methyluridine-3'-phosphorothioate
  modified_base 2: mod_base = OTHER; note = 2'-fluorouridine-3'-phosphorothioate
  modified_base 3: mod_base = OTHER; note = 2'-O-methylcytidine-3'-phosphate
  modified_base 4: mod_base = OTHER; note = 2'-fluorocytidine-3'-phosphate
  modified_base 5: mod_base = OTHER; note = 2'-O-methyladenosine-3'-phosphate
  modified_base 6: mod_base = OTHER; note = 2'-fluorouridine-3'-phosphate
  modified_base 7: mod_base = OTHER; note = 2'-O-methyluridine-3'-phosphate
  modified_base 8: mod_base = OTHER; note = 2'-fluorocytidine-3'-phosphate
  modified_base 9: mod_base = OTHER; note = 2'-O-methyladenosine-3'-phosphate
  modified_base 10: mod_base = OTHER; note = 2'-fluorocytidine-3'-phosphate
  modified_base 11: mod_base = OTHER; note = 2'-O-methylcytidine-3'-phosphate
  modified_base 12: mod_base = OTHER; note = 2'-fluorocytidine-3'-phosphate
  modified_base 13: mod_base = OTHER; note = 2'-O-methyluridine-3'-phosphate
  modified_base 14: mod_base = OTHER; note = 2'-fluoroguanosine-3'-phosphate
  modified_base 15: mod_base = OTHER; note = 2'-O-methylguanosine-3'-phosphate
  modified_base 16: mod_base = OTHER; note = 2'-fluoroadenosine-3'-phosphate
  modified_base 17: mod_base = OTHER; note = 2'-O-methyladenosine-3'-phosphate
  modified_base 18: mod_base = OTHER; note = 2'-fluoroguanosine-3'-phosphate
  modified_base 19: mod_base = OTHER; note = 2'-O-methylcytidine-3'-phosphate
  modified_base 20: mod_base = OTHER; note = 2'-fluoroguanosine-3'-phosphate
  modified_base 21: mod_base = OTHER; note = 2'-O-methylguanosine-3'-phosphorothioate
  modified_base 22: mod_base = OTHER; note = 2'-deoxythymidine-3'-phosphate
  modified_base 23: mod_base = OTHER; note = 2'-deoxythymidine-3'-phosphate
ttccattcaccctggaagcggtt

SEQ ID NO: 150 - RNA, 23 nt, synthetic construct
  source 1..23: mol_type = other RNA
  modified_base 1: mod_base = OTHER; note = 2'-O-methyluridine-3'-phosphorothioate
  modified_base 2: mod_base = OTHER; note = 2'-fluorouridine-3'-phosphorothioate
  modified_base 3: mod_base = OTHER; note = 2'-O-methylcytidine-3'-phosphate
  modified_base 4: mod_base = OTHER; note = 2'-fluorocytidine-3'-phosphate
  modified_base 5: mod_base = OTHER; note = 2'-O-methyladenosine-3'-phosphate
  modified_base 6: mod_base = OTHER; note = 2'-fluoroguanosine-3'-phosphate
  modified_base 7: mod_base = OTHER; note = 2'-O-methyluridine-3'-phosphate
  modified_base 8: mod_base = OTHER; note = 2'-fluoroguanosine-3'-phosphate
  modified_base 9: mod_base = OTHER; note = 2'-O-methyluridine-3'-phosphate
  modified_base 10: mod_base = OTHER; note = 2'-fluoroguanosine-3'-phosphate
  modified_base 11: mod_base = OTHER; note = 2'-O-methylguanosine-3'-phosphate
  modified_base 12: mod_base = OTHER; note = 2'-fluoroadenosine-3'-phosphate
  modified_base 13: mod_base = OTHER; note = 2'-O-methylguanosine-3'-phosphate
  modified_base 14: mod_base = OTHER; note = 2'-fluoroadenosine-3'-phosphate
  modified_base 15: mod_base = OTHER; note = 2'-O-methyluridine-3'-phosphate
  modified_base 16: mod_base = OTHER; note = 2'-fluoroguanosine-3'-phosphate
  modified_base 17: mod_base = OTHER; note = 2'-O-methyladenosine-3'-phosphate
  modified_base 18: mod_base = OTHER; note = 2'-fluorocytidine-3'-phosphate
  modified_base 19: mod_base = OTHER; note = 2'-O-methylcytidine-3'-phosphate
  modified_base 20: mod_base = OTHER; note = 2'-fluorouridine-3'-phosphate
  modified_base 21: mod_base = OTHER; note = 2'-O-methyluridine-3'-phosphorothioate
  modified_base 22: mod_base = OTHER; note = 2'-deoxythymidine-3'-phosphate
  modified_base 23: mod_base = OTHER; note = 2'-deoxythymidine-3'-phosphate
ttccagtgtggagatgacctttt

SEQ ID NO: 151 - RNA, 23 nt, synthetic construct
  source 1..23: mol_type = other RNA
  modified_base 1: mod_base = OTHER; note = 2'-O-methyluridine-3'-phosphorothioate
  modified_base 2: mod_base = OTHER; note = 2'-fluorouridine-3'-phosphorothioate
  modified_base 3: mod_base = OTHER; note = 2'-O-methylcytidine-3'-phosphate
  modified_base 4: mod_base = OTHER; note = 2'-fluorouridine-3'-phosphate
  modified_base 5: mod_base = OTHER; note = 2'-O-methylcytidine-3'-phosphate
  modified_base 6: mod_base = OTHER; note = 2'-fluoroadenosine-3'-phosphate
  modified_base 7: mod_base = OTHER; note = 2'-O-methyladenosine-3'-phosphate
  modified_base 8: mod_base = OTHER; note = 2'-fluoroguanosine-3'-phosphate
  modified_base 9: mod_base = OTHER; note = 2'-O-methylcytidine-3'-phosphate
  modified_base 10: mod_base = OTHER; note = 2'-fluorouridine-3'-phosphate
  modified_base 11: mod_base = OTHER; note = 2'-O-methylcytidine-3'-phosphate
  modified_base 12: mod_base = OTHER; note = 2'-fluoroguanosine-3'-phosphate
  modified_base 13: mod_base = OTHER; note = 2'-O-methylcytidine-3'-phosphate
  modified_base 14: mod_base = OTHER; note = 2'-fluorocytidine-3'-phosphate
  modified_base 15: mod_base = OTHER; note = 2'-O-methyladenosine-3'-phosphate
  modified_base 16: mod_base = OTHER; note = 2'-fluorocytidine-3'-phosphate
  modified_base 17: mod_base = OTHER; note = 2'-O-methylguanosine-3'-phosphate
  modified_base 18: mod_base = OTHER; note = 2'-fluoroguanosine-3'-phosphate
  modified_base 19: mod_base = OTHER; note = 2'-O-methyluridine-3'-phosphate
  modified_base 20: mod_base = OTHER; note = 2'-fluorocytidine-3'-phosphate
  modified_base 21: mod_base = OTHER; note = 2'-O-methylguanosine-3'-phosphorothioate
  modified_base 22: mod_base = OTHER; note = 2'-O-methyluridine-3'-phosphorothioate
  modified_base 23: mod_base = OTHER; note = 2'-O-methyluridine-3'-phosphate
ttctcaagctcgccacggtcgtt

SEQ ID NO: 152 - RNA, 23 nt, synthetic construct
  source 1..23: mol_type = other RNA
  modified_base 1: mod_base = OTHER; note = 2'-O-methyluridine-3'-phosphorothioate
  modified_base 2: mod_base = OTHER; note = 2'-fluorouridine-3'-phosphorothioate
  modified_base 3: mod_base = OTHER; note = 2'-O-methyladenosine-3'-phosphate
  modified_base 4: mod_base = OTHER; note = 2'-fluoroadenosine-3'-phosphate
  modified_base 5: mod_base = OTHER; note = 2'-O-methyluridine-3'-phosphate
  modified_base 6: mod_base = OTHER; note = 2'-fluoroguanosine-3'-phosphate
  modified_base 7: mod_base = OTHER; note = 2'-O-methyluridine-3'-phosphate
  modified_base 8: mod_base = OTHER; note = 2'-fluoroadenosine-3'-phosphate
  modified_base 9: mod_base = OTHER; note = 2'-O-methylguanosine-3'-phosphate
  modified_base 10: mod_base = OTHER; note = 2'-fluorocytidine-3'-phosphate
  modified_base 11: mod_base = OTHER; note = 2'-O-methyladenosine-3'-phosphate
  modified_base 12: mod_base = OTHER; note = 2'-fluorocytidine-3'-phosphate
  modified_base 13: mod_base = OTHER; note = 2'-O-methylcytidine-3'-phosphate
  modified_base 14: mod_base = OTHER; note = 2'-fluoroadenosine-3'-phosphate
  modified_base 15: mod_base = OTHER; note = 2'-O-methylguanosine-3'-phosphate
  modified_base 16: mod_base = OTHER; note = 2'-fluorouridine-3'-phosphate
  modified_base 17: mod_base = OTHER; note = 2'-O-methyladenosine-3'-phosphate
  modified_base 18: mod_base = OTHER; note = 2'-fluorocytidine-3'-phosphate
  modified_base 19: mod_base = OTHER; note = 2'-O-methylguanosine-3'-phosphate
  modified_base 20: mod_base = OTHER; note = 2'-fluorouridine-3'-phosphate
  modified_base 21: mod_base = OTHER; note = 2'-O-methylguanosine-3'-phosphorothioate
  modified_base 22: mod_base = OTHER; note = 2'-O-methyluridine-3'-phosphorothioate
  modified_base 23: mod_base = OTHER; note = 2'-O-methyluridine-3'-phosphate
ttaatgtagcaccagtacgtgtt

SEQ ID NO: 153 - RNA, 23 nt, synthetic construct
  source 1..23: mol_type = other RNA
  modified_base 1: mod_base = OTHER; note = 2'-O-methyluridine-3'-phosphorothioate
  modified_base 2: mod_base = OTHER; note = 2'-fluorouridine-3'-phosphorothioate
  modified_base 3: mod_base = OTHER; note = 2'-O-methylcytidine-3'-phosphate
  modified_base 4: mod_base = OTHER; note = 2'-fluoroadenosine-3'-phosphate
  modified_base 5: mod_base = OTHER; note = 2'-O-methyladenosine-3'-phosphate
  modified_base 6: mod_base = OTHER; note = 2'-fluorocytidine-3'-phosphate
  modified_base 7: mod_base = OTHER; note = 2'-O-methyladenosine-3'-phosphate
  modified_base 8: mod_base = OTHER; note = 2'-fluorouridine-3'-phosphate
  modified_base 9: mod_base = OTHER; note = 2'-O-methylguanosine-3'-phosphate
  modified_base 10: mod_base = OTHER; note = 2'-fluorocytidine-3'-phosphate
  modified_base 11: mod_base = OTHER; note = 2'-O-methylguanosine-3'-phosphate
  modified_base 12: mod_base = OTHER; note = 2'-fluoroguanosine-3'-phosphate
  modified_base 13: mod_base = OTHER; note = 2'-O-methyladenosine-3'-phosphate
  modified_base 14: mod_base = OTHER; note = 2'-fluorouridine-3'-phosphate
  modified_base 15: mod_base = OTHER; note = 2'-O-methylcytidine-3'-phosphate
  modified_base 16: mod_base = OTHER; note = 2'-fluorouridine-3'-phosphate
  modified_base 17: mod_base = OTHER; note = 2'-O-methylcytidine-3'-phosphate
  modified_base 18: mod_base = OTHER; note = 2'-fluorocytidine-3'-phosphate
  modified_base 19: mod_base = OTHER; note = 2'-O-methyluridine-3'-phosphate
  modified_base 20: mod_base = OTHER; note = 2'-fluoroguanosine-3'-phosphate
  modified_base 21: mod_base = OTHER; note = 2'-O-methylguanosine-3'-phosphorothioate
  modified_base 22: mod_base = OTHER; note = 2'-O-methyluridine-3'-phosphorothioate
  modified_base 23: mod_base = OTHER; note = 2'-O-methyluridine-3'-phosphate
ttcaacatgcggatctcctggtt

SEQ ID NO: 154 - RNA, 23 nt, synthetic construct
  source 1..23: mol_type = other RNA
  modified_base 1: mod_base = OTHER; note = 2'-O-methyluridine-3'-phosphorothioate
  modified_base 2: mod_base = OTHER; note = 2'-fluorouridine-3'-phosphorothioate
  modified_base 3: mod_base = OTHER; note = 2'-O-methylcytidine-3'-phosphate
  modified_base 4: mod_base = OTHER; note = 2'-fluorouridine-3'-phosphate
  modified_base 5: mod_base = OTHER; note = 2'-O-methyluridine-3'-phosphate
  modified_base 6: mod_base = OTHER; note = 2'-fluorocytidine-3'-phosphate
  modified_base 7: mod_base = OTHER; note = 2'-O-methyladenosine-3'-phosphate
  modified_base 8: mod_base = OTHER; note = 2'-fluoroadenosine-3'-phosphate
  modified_base 9: mod_base = OTHER; note = 2'-O-methylcytidine-3'-phosphate
  modified_base 10: mod_base = OTHER; note = 2'-fluoroadenosine-3'-phosphate
  modified_base 11: mod_base = OTHER; note = 2'-O-methyluridine-3'-phosphate
  modified_base 12: mod_base = OTHER; note = 2'-fluoroguanosine-3'-phosphate
  modified_base 13: mod_base = OTHER; note = 2'-O-methylcytidine-3'-phosphate
  modified_base 14: mod_base = OTHER; note = 2'-fluoroguanosine-3'-phosphate
  modified_base 15: mod_base = OTHER; note = 2'-O-methylguanosine-3'-phosphate
  modified_base 16: mod_base = OTHER; note = 2'-fluoroadenosine-3'-phosphate
  modified_base 17: mod_base = OTHER; note = 2'-O-methyluridine-3'-phosphate
  modified_base 18: mod_base = OTHER; note = 2'-fluorocytidine-3'-phosphate
  modified_base 19: mod_base = OTHER; note = 2'-O-methyluridine-3'-phosphate
  modified_base 20: mod_base = OTHER; note = 2'-fluorocytidine-3'-phosphate
  modified_base 21: mod_base = OTHER; note = 2'-O-methylcytidine-3'-phosphorothioate
  modified_base 22: mod_base = OTHER; note = 2'-O-methyluridine-3'-phosphorothioate
  modified_base 23: mod_base = OTHER; note = 2'-O-methyluridine-3'-phosphate
ttcttcaacatgcggatctcctt

SEQ ID NO: 155 - RNA, 23 nt, synthetic construct
  source 1..23: mol_type = other RNA
  modified_base 1: mod_base = OTHER; note = 2'-O-methyluridine-3'-phosphorothioate
  modified_base 2: mod_base = OTHER; note = 2'-fluorouridine-3'-phosphorothioate
  modified_base 3: mod_base = OTHER; note = 2'-O-methylcytidine-3'-phosphate
  modified_base 4: mod_base = OTHER; note = 2'-fluorouridine-3'-phosphate
  modified_base 5: mod_base = OTHER; note = 2'-O-methylguanosine-3'-phosphate
  modified_base 6: mod_base = OTHER; note = 2'-fluorouridine-3'-phosphate
  modified_base 7: mod_base = OTHER; note = 2'-O-methylguanosine-3'-phosphate
  modified_base 8: mod_base = OTHER; note = 2'-fluorouridine-3'-phosphate
  modified_base 9: mod_base = OTHER; note = 2'-O-methyluridine-3'-phosphate
  modified_base 10: mod_base = OTHER; note = 2'-fluoroguanosine-3'-phosphate
  modified_base 11: mod_base = OTHER; note = 2'-O-methyluridine-3'-phosphate
  modified_base 12: mod_base = OTHER; note = 2'-fluoroadenosine-3'-phosphate
  modified_base 13: mod_base = OTHER; note = 2'-O-methylcytidine-3'-phosphate
  modified_base 14: mod_base = OTHER; note = 2'-fluoroguanosine-3'-phosphate
  modified_base 15: mod_base = OTHER; note = 2'-O-methyluridine-3'-phosphate
  modified_base 16: mod_base = OTHER; note = 2'-fluoroguanosine-3'-phosphate
  modified_base 17: mod_base = OTHER; note = 2'-O-methylcytidine-3'-phosphate
  modified_base 18: mod_base = OTHER; note = 2'-fluoroadenosine-3'-phosphate
  modified_base 19: mod_base = OTHER; note = 2'-O-methylguanosine-3'-phosphate
  modified_base 20: mod_base = OTHER; note = 2'-fluoroguanosine-3'-phosphate
  modified_base 21: mod_base = OTHER; note = 2'-O-methyladenosine-3'-phosphorothioate
  modified_base 22: mod_base = OTHER; note = 2'-O-methyluridine-3'-phosphorothioate
  modified_base 23: mod_base = OTHER; note = 2'-O-methyluridine-3'-phosphate
ttctgtgttgtacgtgcaggatt

SEQ ID NO: 156 - RNA, 23 nt, synthetic construct
  source 1..23: mol_type = other RNA
  modified_base 1: mod_base = OTHER; note = 2'-O-methyluridine-3'-phosphorothioate
  modified_base 2: mod_base = OTHER; note = 2'-fluorouridine-3'-phosphorothioate
  modified_base 3: mod_base = OTHER; note = 2'-O-methylguanosine-3'-phosphate
  modified_base 4: mod_base = OTHER; note = 2'-fluorouridine-3'-phosphate
  modified_base 5: mod_base = OTHER; note = 2'-O-methyluridine-3'-phosphate
  modified_base 6: mod_base = OTHER; note = 2'-fluoroguanosine-3'-phosphate
  modified_base 7: mod_base = OTHER; note = 2'-O-methyladenosine-3'-phosphate
  modified_base 8: mod_base = OTHER; note = 2'-fluoroadenosine-3'-phosphate
  modified_base 9: mod_base = OTHER; note = 2'-O-methylcytidine-3'-phosphate
  modified_base 10: mod_base = OTHER; note = 2'-fluorocytidine-3'-phosphate
  modified_base 11: mod_base = OTHER; note = 2'-O-methyluridine-3'-phosphate
  modified_base 12: mod_base = OTHER; note = 2'-fluoroguanosine-3'-phosphate
  modified_base 13: mod_base = OTHER; note = 2'-O-methyluridine-3'-phosphate
  modified_base 14: mod_base = OTHER; note = 2'-fluorouridine-3'-phosphate
  modified_base 15: mod_base = OTHER; note = 2'-O-methylguanosine-3'-phosphate
  modified_base 16: mod_base = OTHER; note = 2'-fluoroadenosine-3'-phosphate
  modified_base 17: mod_base = OTHER; note = 2'-O-methyluridine-3'-phosphate
  modified_base 18: mod_base = OTHER; note = 2'-fluoroguanosine-3'-phosphate
  modified_base 19: mod_base = OTHER; note = 2'-O-methyladenosine-3'-phosphate
  modified_base 20: mod_base = OTHER; note = 2'-fluoroguanosine-3'-phosphate
  modified_base 21: mod_base = OTHER; note = 2'-O-methylguanosine-3'-phosphorothioate
  modified_base 22: mod_base = OTHER; note = 2'-O-methyluridine-3'-phosphorothioate
  modified_base 23: mod_base = OTHER; note = 2'-O-methyluridine-3'-phosphate
ttgttgaacctgttgatgaggtt

SEQ ID NO: 157 - RNA, 23 nt, synthetic construct
  source 1..23: mol_type = other RNA
  modified_base 1: mod_base = OTHER; note = 2'-O-methyluridine-3'-phosphorothioate
  modified_base 2: mod_base = OTHER; note = 2'-fluorouridine-3'-phosphorothioate
  modified_base 3: mod_base = OTHER; note = 2'-O-methylcytidine-3'-phosphate
  modified_base 4: mod_base = OTHER; note = 2'-fluorocytidine-3'-phosphate
  modified_base 5: mod_base = OTHER; note = 2'-O-methyladenosine-3'-phosphate
  modified_base 6: mod_base = OTHER; note = 2'-fluorouridine-3'-phosphate
  modified_base 7: mod_base = OTHER; note = 2'-O-methyluridine-3'-phosphate
  modified_base 8: mod_base = OTHER; note = 2'-fluorocytidine-3'-phosphate
  modified_base 9: mod_base = OTHER; note = 2'-O-methyladenosine-3'-phosphate
  modified_base 10: mod_base = OTHER; note = 2'-fluorocytidine-3'-phosphate
  modified_base 11: mod_base = OTHER; note = 2'-O-methylcytidine-3'-phosphate
  modified_base 12: mod_base = OTHER; note = 2'-fluorocytidine-3'-phosphate
  modified_base 13: mod_base = OTHER; note = 2'-O-methyluridine-3'-phosphate
  modified_base 14: mod_base = OTHER; note = 2'-fluoroguanosine-3'-phosphate
  modified_base 15: mod_base = OTHER; note = 2'-O-methylguanosine-3'-phosphate
  modified_base 16: mod_base = OTHER; note = 2'-fluoroadenosine-3'-phosphate
  modified_base 17: mod_base = OTHER; note = 2'-O-methyladenosine-3'-phosphate
  modified_base 18: mod_base = OTHER; note = 2'-fluoroguanosine-3'-phosphate
  modified_base 19: mod_base = OTHER; note = 2'-O-methylcytidine-3'-phosphate
  modified_base 20: mod_base = OTHER; note = 2'-fluoroguanosine-3'-phosphate
  modified_base 21: mod_base = OTHER; note = 2'-O-methylguanosine-3'-phosphorothioate
  modified_base 22: mod_base = OTHER; note = 2'-O-methyluridine-3'-phosphorothioate
  modified_base 23: mod_base = OTHER; note = 2'-O-methyluridine-3'-phosphate
ttccattcaccctggaagcggtt

SEQ ID NO: 158 - RNA, 23 nt, synthetic construct
  source 1..23: mol_type = other RNA
  modified_base 1: mod_base = OTHER; note = 2'-O-methyluridine-3'-phosphorothioate
  modified_base 2: mod_base = OTHER; note = 2'-fluorouridine-3'-phosphorothioate
  modified_base 3: mod_base = OTHER; note = 2'-O-methylcytidine-3'-phosphate
  modified_base 4: mod_base = OTHER; note = 2'-fluorocytidine-3'-phosphate
  modified_base 5: mod_base = OTHER; note = 2'-O-methyladenosine-3'-phosphate
  modified_base 6: mod_base = OTHER; note = 2'-fluoroguanosine-3'-phosphate
  modified_base 7: mod_base = OTHER; note = 2'-O-methyluridine-3'-phosphate
  modified_base 8: mod_base = OTHER; note = 2'-fluoroguanosine-3'-phosphate
  modified_base 9: mod_base = OTHER; note = 2'-O-methyluridine-3'-phosphate
  modified_base 10: mod_base = OTHER; note = 2'-fluoroguanosine-3'-phosphate
  modified_base 11: mod_base = OTHER; note = 2'-O-methylguanosine-3'-phosphate
  modified_base 12: mod_base = OTHER; note = 2'-fluoroadenosine-3'-phosphate
  modified_base 13: mod_base = OTHER; note = 2'-O-methylguanosine-3'-phosphate
  modified_base 14: mod_base = OTHER; note = 2'-fluoroadenosine-3'-phosphate
  modified_base 15: mod_base = OTHER; note = 2'-O-methyluridine-3'-phosphate
  modified_base 16: mod_base = OTHER; note = 2'-fluoroguanosine-3'-phosphate
  modified_base 17: mod_base = OTHER; note = 2'-O-methyladenosine-3'-phosphate
  modified_base 18: mod_base = OTHER; note = 2'-fluorocytidine-3'-phosphate
  modified_base 19: mod_base = OTHER; note = 2'-O-methylcytidine-3'-phosphate
  modified_base 20: mod_base = OTHER; note = 2'-fluorouridine-3'-phosphate
  modified_base 21: mod_base = OTHER; note = 2'-O-methyluridine-3'-phosphorothioate
  modified_base 22: mod_base = OTHER; note = 2'-O-methyluridine-3'-phosphorothioate
  modified_base 23: mod_base = OTHER; note = 2'-O-methyluridine-3'-phosphate
ttccagtgtggagatgacctttt

SEQ ID NO: 159 - RNA, 23 nt, synthetic construct
  source 1..23: mol_type = other RNA
  modified_base 1: mod_base = OTHER; note = 2'-O-methyluridine-3'-phosphorothioate
  modified_base 2: mod_base = OTHER; note = 2'-fluorouridine-3'-phosphorothioate
  modified_base 3: mod_base = OTHER; note = 2'-O-methylcytidine-3'-phosphate
  modified_base 4: mod_base = OTHER; note = 2'-O-methyluridine-3'-phosphate
  modified_base 5: mod_base = OTHER; note = 2'-O-methylcytidine-3'-phosphate
  modified_base 6: mod_base = OTHER; note = 2'-fluoroadenosine-3'-phosphate
  modified_base 7: mod_base = OTHER; note = 2'-O-methyladenosine-3'-phosphate
  modified_base 8: mod_base = OTHER; note = 2'-O-methylguanosine-3'-phosphate
  modified_base 9: mod_base = OTHER; note = 2'-O-methylcytidine-3'-phosphate
  modified_base 10: mod_base = OTHER; note = 2'-O-methyluridine-3'-phosphate
  modified_base 11: mod_base = OTHER; note = 2'-O-methylcytidine-3'-phosphate
  modified_base 12: mod_base = OTHER; note = 2'-O-methylguanosine-3'-phosphate
  modified_base 13: mod_base = OTHER; note = 2'-O-methylcytidine-3'-phosphate
  modified_base 14: mod_base = OTHER; note = 2'-fluorocytidine-3'-phosphate
  modified_base 15: mod_base = OTHER; note = 2'-O-methyladenosine-3'-phosphate
  modified_base 16: mod_base = OTHER; note = 2'-fluorocytidine-3'-phosphate
  modified_base 17: mod_base = OTHER; note = 2'-O-methylguanosine-3'-phosphate
  modified_base 18: mod_base = OTHER; note = 2'-O-methylguanosine-3'-phosphate
  modified_base 19: mod_base = OTHER; note = 2'-O-methyluridine-3'-phosphate
  modified_base 20: mod_base = OTHER; note = 2'-O-methylcytidine-3'-phosphate
  modified_base 21: mod_base = OTHER; note = 2'-O-methylguanosine-3'-phosphorothioate
  modified_base 22: mod_base = OTHER; note = 2'-O-methyluridine-3'-phosphorothioate
  modified_base 23: mod_base = OTHER; note = 2'-O-methyluridine-3'-phosphate
ttctcaagctcgccacggtcgtt

SEQ ID NO: 160 - RNA, 23 nt, synthetic construct
  source 1..23: mol_type = other RNA
  modified_base 1: mod_base = OTHER; note = 2'-O-methyluridine-3'-phosphorothioate
  modified_base 2: mod_base = OTHER; note = 2'-fluorouridine-3'-phosphorothioate
  modified_base 3: mod_base = OTHER; note = 2'-O-methyladenosine-3'-phosphate
  modified_base 4: mod_base = OTHER; note = 2'-O-methyladenosine-3'-phosphate
  modified_base 5: mod_base = OTHER; note = 2'-O-methyluridine-3'-phosphate
  modified_base 6: mod_base = OTHER; note = 2'-fluoroguanosine-3'-phosphate
  modified_base 7: mod_base = OTHER; note = 2'-O-methyluridine-3'-phosphate
  modified_base 8: mod_base = OTHER; note = 2'-O-methyladenosine-3'-phosphate
  modified_base 9: mod_base = OTHER; note = 2'-O-methylguanosine-3'-phosphate
  modified_base 10: mod_base = OTHER; note = 2'-O-methylcytidine-3'-phosphate
  modified_base 11: mod_base = OTHER; note = 2'-O-methyladenosine-3'-phosphate
  modified_base 12: mod_base = OTHER; note = 2'-O-methylcytidine-3'-phosphate
  modified_base 13: mod_base = OTHER; note = 2'-O-methylcytidine-3'-phosphate
  modified_base 14: mod_base = OTHER; note = 2'-fluoroadenosine-3'-phosphate
  modified_base 15: mod_base = OTHER; note = 2'-O-methylguanosine-3'-phosphate
  modified_base 16: mod_base = OTHER; note = 2'-fluorouridine-3'-phosphate
  modified_base 17: mod_base = OTHER; note = 2'-O-methyladenosine-3'-phosphate
  modified_base 18: mod_base = OTHER; note = 2'-O-methylcytidine-3'-phosphate
  modified_base 19: mod_base = OTHER; note = 2'-O-methylguanosine-3'-phosphate
  modified_base 20: mod_base = OTHER; note = 2'-O-methyluridine-3'-phosphate
  modified_base 21: mod_base = OTHER; note = 2'-O-methylguanosine-3'-phosphorothioate
  modified_base 22: mod_base = OTHER; note = 2'-O-methyluridine-3'-phosphorothioate
  modified_base 23: mod_base = OTHER; note = 2'-O-methyluridine-3'-phosphate
ttaatgtagcaccagtacgtgtt

SEQ ID NO: 161 - RNA, 23 nt, synthetic construct
  source 1..23: mol_type = other RNA
  modified_base 1: mod_base = OTHER; note = 2'-O-methyluridine-3'-phosphorothioate
  modified_base 2: mod_base = OTHER; note = 2'-fluorouridine-3'-phosphorothioate
  modified_base 3: mod_base = OTHER; note = 2'-O-methylcytidine-3'-phosphate
  modified_base 4: mod_base = OTHER; note = 2'-O-methyladenosine-3'-phosphate
  modified_base 5: mod_base = OTHER; note = 2'-O-methyladenosine-3'-phosphate
  modified_base 6: mod_base = OTHER; note = 2'-fluorocytidine-3'-phosphate
  modified_base 7: mod_base = OTHER; note = 2'-O-methyladenosine-3'-phosphate
  modified_base 8: mod_base = OTHER; note = 2'-O-methyluridine-3'-phosphate
  modified_base 9: mod_base = OTHER; note = 2'-O-methylguanosine-3'-phosphate
  modified_base 10: mod_base = OTHER; note = 2'-O-methylcytidine-3'-phosphate
  modified_base 11: mod_base = OTHER; note = 2'-O-methylguanosine-3'-phosphate
  modified_base 12: mod_base = OTHER; note = 2'-O-methylguanosine-3'-phosphate
  modified_base 13: mod_base = OTHER; note = 2'-O-methyladenosine-3'-phosphate
  modified_base 14: mod_base = OTHER; note = 2'-fluorouridine-3'-phosphate
  modified_base 15: mod_base = OTHER; note = 2'-O-methylcytidine-3'-phosphate
  modified_base 16: mod_base = OTHER; note = 2'-fluorouridine-3'-phosphate
  modified_base 17: mod_base = OTHER; note = 2'-O-methylcytidine-3'-phosphate
  modified_base 18: mod_base = OTHER; note = 2'-O-methylcytidine-3'-phosphate
  modified_base 19: mod_base = OTHER; note = 2'-O-methyluridine-3'-phosphate
  modified_base 20: mod_base = OTHER; note = 2'-O-methylguanosine-3'-phosphate
  modified_base 21: mod_base = OTHER; note = 2'-O-methylguanosine-3'-phosphorothioate
  modified_base 22: mod_base = OTHER; note = 2'-O-methyluridine-3'-phosphorothioate
  modified_base 23: mod_base = OTHER; note = 2'-O-methyluridine-3'-phosphate
ttcaacatgcggatctcctggtt

SEQ ID NO: 162 - RNA, 23 nt, synthetic construct
  source 1..23: mol_type = other RNA
  modified_base 1: mod_base = OTHER; note = 2'-O-methyluridine-3'-phosphorothioate
  modified_base 2: mod_base = OTHER; note = 2'-fluorouridine-3'-phosphorothioate
  modified_base 3: mod_base = OTHER; note = 2'-O-methylcytidine-3'-phosphate
  modified_base 4: mod_base = OTHER; note = 2'-O-methyluridine-3'-phosphate
  modified_base 5: mod_base = OTHER; note = 2'-O-methyluridine-3'-phosphate
  modified_base 6: mod_base = OTHER; note = 2'-fluorocytidine-3'-phosphate
  modified_base 7: mod_base = OTHER; note = 2'-O-methyladenosine-3'-phosphate
  modified_base 8: mod_base = OTHER; note = 2'-O-methyladenosine-3'-phosphate
  modified_base 9: mod_base = OTHER; note = 2'-O-methylcytidine-3'-phosphate
  modified_base 10: mod_base = OTHER; note = 2'-O-methyladenosine-3'-phosphate
  modified_base 11: mod_base = OTHER; note = 2'-O-methyluridine-3'-phosphate
  modified_base 12: mod_base = OTHER; note = 2'-O-methylguanosine-3'-phosphate
  modified_base 13: mod_base = OTHER; note = 2'-O-methylcytidine-3'-phosphate
  modified_base 14: mod_base = OTHER; note = 2'-fluoroguanosine-3'-phosphate
  modified_base 15: mod_base = OTHER; note = 2'-O-methylguanosine-3'-phosphate
  modified_base 16: mod_base = OTHER; note = 2'-fluoroadenosine-3'-phosphate
  modified_base 17: mod_base = OTHER; note = 2'-O-methyluridine-3'-phosphate
  modified_base 18: mod_base = OTHER; note = 2'-O-methylcytidine-3'-phosphate
  modified_base 19: mod_base = OTHER; note = 2'-O-methyluridine-3'-phosphate
  modified_base 20: mod_base = OTHER; note = 2'-O-methylcytidine-3'-phosphate
  modified_base 21: mod_base = OTHER; note = 2'-O-methylcytidine-3'-phosphorothioate
  modified_base 22: mod_base = OTHER; note = 2'-O-methyluridine-3'-phosphorothioate
  modified_base 23: mod_base = OTHER; note = 2'-O-methyluridine-3'-phosphate
ttcttcaacatgcggatctcctt

SEQ ID NO: 163 - RNA, 23 nt, synthetic construct
  source 1..23: mol_type = other RNA
  modified_base 1: mod_base = OTHER; note = 2'-O-methyluridine-3'-phosphorothioate
  modified_base 2: mod_base = OTHER; note = 2'-fluorouridine-3'-phosphorothioate
  modified_base 3: mod_base = OTHER; note = 2'-O-methylcytidine-3'-phosphate
  modified_base 4: mod_base = OTHER; note = 2'-O-methyluridine-3'-phosphate
  modified_base 5: mod_base = OTHER; note = 2'-O-methylguanosine-3'-phosphate
  modified_base 6: mod_base = OTHER; note = 2'-fluorouridine-3'-phosphate
  modified_base 7: mod_base = OTHER; note = 2'-O-methylguanosine-3'-phosphate
  modified_base 8: mod_base = OTHER; note = 2'-O-methyluridine-3'-phosphate
  modified_base 9: mod_base = OTHER; note = 2'-O-methyluridine-3'-phosphate
  modified_base 10: mod_base = OTHER; note = 2'-O-methylguanosine-3'-phosphate
  modified_base 11: mod_base = OTHER; note = 2'-O-methyluridine-3'-phosphate
  modified_base 12: mod_base = OTHER; note = 2'-O-methyladenosine-3'-phosphate
  modified_base 13: mod_base = OTHER; note = 2'-O-methylcytidine-3'-phosphate
  modified_base 14: mod_base = OTHER; note = 2'-fluoroguanosine-3'-phosphate
  modified_base 15: mod_base = OTHER; note = 2'-O-methyluridine-3'-phosphate
  modified_base 16: mod_base = OTHER; note = 2'-fluoroguanosine-3'-phosphate
  modified_base 17: mod_base = OTHER; note = 2'-O-methylcytidine-3'-phosphate
  modified_base 18: mod_base = OTHER; note = 2'-O-methyladenosine-3'-phosphate
  modified_base 19: mod_base = OTHER; note = 2'-O-methylguanosine-3'-phosphate
  modified_base 20: mod_base = OTHER; note = 2'-O-methylguanosine-3'-phosphate
  modified_base 21: mod_base = OTHER; note = 2'-O-methyladenosine-3'-phosphorothioate
  modified_base 22: mod_base = OTHER; note = 2'-O-methyluridine-3'-phosphorothioate
  modified_base 23: mod_base = OTHER; note = 2'-O-methyluridine-3'-phosphate
ttctgtgttgtacgtgcaggatt

SEQ ID NO: 164 - RNA, 23 nt, synthetic construct
  source 1..23: mol_type = other RNA
  modified_base 1: mod_base = OTHER; note = 2'-O-methyluridine-3'-phosphorothioate
  modified_base 2: mod_base = OTHER; note = 2'-fluorouridine-3'-phosphorothioate
  modified_base 3: mod_base = OTHER; note = 2'-O-methylguanosine-3'-phosphate
  modified_base 4: mod_base = OTHER; note = 2'-O-methyluridine-3'-phosphate
  modified_base 5: mod_base = OTHER; note = 2'-O-methyluridine-3'-phosphate
  modified_base 6: mod_base = OTHER; note = 2'-fluoroguanosine-3'-phosphate
  modified_base 7: mod_base = OTHER; note = 2'-O-methyladenosine-3'-phosphate
  modified_base 8: mod_base = OTHER; note = 2'-O-methyladenosine-3'-phosphate
  modified_base 9: mod_base = OTHER; note = 2'-O-methylcytidine-3'-phosphate
  modified_base 10: mod_base = OTHER; note = 2'-O-methylcytidine-3'-phosphate
  modified_base 11: mod_base = OTHER; note = 2'-O-methyluridine-3'-phosphate
  modified_base 12: mod_base = OTHER; note = 2'-O-methylguanosine-3'-phosphate
  modified_base 13: mod_base = OTHER; note = 2'-O-methyluridine-3'-phosphate
  modified_base 14: mod_base = OTHER; note = 2'-fluorouridine-3'-phosphate
  modified_base 15: mod_base = OTHER; note = 2'-O-methylguanosine-3'-phosphate
  modified_base 16: mod_base = OTHER; note = 2'-fluoroadenosine-3'-phosphate
  modified_base 17: mod_base = OTHER; note = 2'-O-methyluridine-3'-phosphate
  modified_base 18: mod_base = OTHER; note = 2'-O-methylguanosine-3'-phosphate
  modified_base 19: mod_base = OTHER; note = 2'-O-methyladenosine-3'-phosphate
  modified_base 20: mod_base = OTHER; note = 2'-O-methylguanosine-3'-phosphate
  modified_base 21: mod_base = OTHER; note = 2'-O-methylguanosine-3'-phosphorothioate
  modified_base 22: mod_base = OTHER; note = 2'-O-methyluridine-3'-phosphorothioate
  modified_base 23: mod_base = OTHER; note = 2'-O-methyluridine-3'-phosphate
ttgttgaacctgttgatgaggtt

SEQ ID NO: 165 - RNA, 23 nt, synthetic construct
  source 1..23: mol_type = other RNA
  modified_base 1: mod_base = OTHER; note = 2'-O-methyluridine-3'-phosphorothioate
  modified_base 2: mod_base = OTHER; note = 2'-fluorouridine-3'-phosphorothioate
  modified_base 3: mod_base = OTHER; note = 2'-O-methylcytidine-3'-phosphate
  modified_base 4: mod_base = OTHER; note = 2'-O-methylcytidine-3'-phosphate
  modified_base 5: mod_base = OTHER; note = 2'-O-methyladenosine-3'-phosphate
  modified_base 6: mod_base = OTHER; note = 2'-fluorouridine-3'-phosphate
  modified_base 7: mod_base = OTHER; note = 2'-O-methyluridine-3'-phosphate
  modified_base 8: mod_base = OTHER; note = 2'-O-methylcytidine-3'-phosphate
  modified_base 9: mod_base = OTHER; note = 2'-O-methyladenosine-3'-phosphate
  modified_base 10: mod_base = OTHER; note = 2'-O-methylcytidine-3'-phosphate
  modified_base 11: mod_base = OTHER; note = 2'-O-methylcytidine-3'-phosphate
  modified_base 12: mod_base = OTHER; note = 2'-O-methylcytidine-3'-phosphate
  modified_base 13: mod_base = OTHER; note = 2'-O-methyluridine-3'-phosphate
  modified_base 14: mod_base = OTHER; note = 2'-fluoroguanosine-3'-phosphate
  modified_base 15: mod_base = OTHER; note = 2'-O-methylguanosine-3'-phosphate
  modified_base 16: mod_base = OTHER; note = 2'-fluoroadenosine-3'-phosphate
  modified_base 17: mod_base = OTHER; note = 2'-O-methyladenosine-3'-phosphate
  modified_base 18: mod_base = OTHER; note = 2'-O-methylguanosine-3'-phosphate
  modified_base 19: mod_base = OTHER; note = 2'-O-methylcytidine-3'-phosphate
  modified_base 20: mod_base = OTHER; note = 2'-O-methylguanosine-3'-phosphate
  modified_base 21: mod_base = OTHER; note = 2'-O-methylguanosine-3'-phosphorothioate
  modified_base 22: mod_base = OTHER; note = 2'-O-methyluridine-3'-phosphorothioate
  modified_base 23: mod_base = OTHER; note = 2'-O-methyluridine-3'-phosphate
ttccattcaccctggaagcggtt

SEQ ID NO: 166 - RNA, 23 nt, synthetic construct
  source 1..23: mol_type = other RNA
  modified_base 1: mod_base = OTHER; note = 2'-O-methyluridine-3'-phosphorothioate
  modified_base 2: mod_base = OTHER; note = 2'-fluorouridine-3'-phosphorothioate
  modified_base 3: mod_base = OTHER; note = 2'-O-methylcytidine-3'-phosphate
  modified_base 4: mod_base = OTHER; note = 2'-O-methylcytidine-3'-phosphate
  modified_base 5: mod_base = OTHER; note = 2'-O-methyladenosine-3'-phosphate
  modified_base 6: mod_base = OTHER; note = 2'-fluoroguanosine-3'-phosphate
  modified_base 7: mod_base = OTHER; note = 2'-O-methyluridine-3'-phosphate
  modified_base 8: mod_base = OTHER; note = 2'-O-methylguanosine-3'-phosphate
  modified_base 9: mod_base = OTHER; note = 2'-O-methyluridine-3'-phosphate
  modified_base 10: mod_base = OTHER; note = 2'-O-methylguanosine-3'-phosphate
  modified_base 11: mod_base = OTHER; note = 2'-O-methylguanosine-3'-phosphate
  modified_base 12: mod_base = OTHER; note = 2'-O-methyladenosine-3'-phosphate
  modified_base 13: mod_base = OTHER; note = 2'-O-methylguanosine-3'-phosphate
  modified_base 14: mod_base = OTHER; note = 2'-fluoroadenosine-3'-phosphate
  modified_base 15: mod_base = OTHER; note = 2'-O-methyluridine-3'-phosphate
  modified_base 16: mod_base = OTHER; note = 2'-fluoroguanosine-3'-phosphate
  modified_base 17: mod_base = OTHER; note = 2'-O-methyladenosine-3'-phosphate
  modified_base 18: mod_base = OTHER; note = 2'-O-methylcytidine-3'-phosphate
  modified_base 19: mod_base = OTHER; note = 2'-O-methylcytidine-3'-phosphate
  modified_base 20: mod_base = OTHER; note = 2'-O-methyluridine-3'-phosphate
  modified_base 21: mod_base = OTHER; note = 2'-O-methyluridine-3'-phosphorothioate
  modified_base 22: mod_base = OTHER; note = 2'-O-methyluridine-3'-phosphorothioate
  modified_base 23: mod_base = OTHER; note = 2'-O-methyluridine-3'-phosphate
ttccagtgtggagatgacctttt

SEQ ID NO: 167 - RNA, 15 nt, synthetic construct
  source 1..15: mol_type = other RNA
  modified_base 1: mod_base = OTHER; note = 2'-fluoroguanosine-3'-phosphorothioate
  modified_base 2: mod_base = OTHER; note = 2'-O-methyladenosine-3'-phosphorothioate
  modified_base 3: mod_base = OTHER; note = 2'-fluorouridine-3'-phosphate
  modified_base 4: mod_base = OTHER; note = 2'-O-methylcytidine-3'-phosphate
  modified_base 5: mod_base = OTHER; note = 2'-fluoroadenosine-3'-phosphate
  modified_base 6: mod_base = OTHER; note = 2'-O-methylguanosine-3'-phosphate
  modified_base 7: mod_base = OTHER; note = 2'-fluoroadenosine-3'-phosphate
  modified_base 8: mod_base = OTHER; note = 2'-O-methyladenosine-3'-phosphate
  modified_base 9: mod_base = OTHER; note = 2'-fluorouridine-3'-phosphate
  modified_base 10: mod_base = OTHER; note = 2'-O-methylguanosine-3'-phosphate
  modified_base 11: mod_base = OTHER; note = 2'-fluorocytidine-3'-phosphate
  modified_base 12: mod_base = OTHER; note = 2'-O-methyluridine-3'-phosphate
  modified_base 13: mod_base = OTHER; note = 2'-fluoroguanosine-3'-phosphorothioate
  modified_base 14: mod_base = OTHER; note = 2'-O-methyladenosine-3'-phosphorothioate
  modified_base 15: mod_base = OTHER; note = 2'-fluoroadenosine-3'-phosphate
gatcagaatgctgaa

SEQ ID NO: 168 - RNA, 15 nt, synthetic construct
  source 1..15: mol_type = other RNA
  modified_base 1: mod_base = OTHER; note = 2'-fluorocytidine-3'-phosphorothioate
  modified_base 2: mod_base = OTHER; note = 2'-O-methyladenosine-3'-phosphorothioate
  modified_base 3: mod_base = OTHER; note = 2'-fluoroguanosine-3'-phosphate
  modified_base 4: mod_base = OTHER; note = 2'-O-methyladenosine-3'-phosphate
  modified_base 5: mod_base = OTHER; note = 2'-fluoroadenosine-3'-phosphate
  modified_base 6: mod_base = OTHER; note = 2'-O-methyluridine-3'-phosphate
  modified_base 7: mod_base = OTHER; note = 2'-fluoroguanosine-3'-phosphate
  modified_base 8: mod_base = OTHER; note = 2'-O-methylcytidine-3'-phosphate
  modified_base 9: mod_base = OTHER; note = 2'-fluorouridine-3'-phosphate
  modified_base 10: mod_base = OTHER; note = 2'-O-methylguanosine-3'-phosphate
  modified_base 11: mod_base = OTHER; note = 2'-fluoroadenosine-3'-phosphate
  modified_base 12: mod_base = OTHER; note = 2'-O-methyladenosine-3'-phosphate
  modified_base 13: mod_base = OTHER; note = 2'-fluoroguanosine-3'-phosphorothioate
  modified_base 14: mod_base = OTHER; note = 2'-O-methyladenosine-3'-phosphorothioate
  modified_base 15: mod_base = OTHER; note = 2'-fluoroadenosine-3'-phosphate
cagaatgctgaagaa

SEQ ID NO: 169 - RNA, 15 nt, synthetic construct
  source 1..15: mol_type = other RNA
  modified_base 1: mod_base = OTHER; note = 2'-fluoroadenosine-3'-phosphorothioate
  modified_base 2: mod_base = OTHER; note = 2'-O-methylcytidine-3'-phosphorothioate
  modified_base 3: mod_base = OTHER; note = 2'-fluoroguanosine-3'-phosphate
  modified_base 4: mod_base = OTHER; note = 2'-O-methyluridine-3'-phosphate
  modified_base 5: mod_base = OTHER; note = 2'-fluoroadenosine-3'-phosphate
  modified_base 6: mod_base = OTHER; note = 2'-O-methylcytidine-3'-phosphate
  modified_base 7: mod_base = OTHER; note = 2'-fluoroadenosine-3'-phosphate
  modified_base 8: mod_base = OTHER; note = 2'-O-methyladenosine-3'-phosphate
  modified_base 9: mod_base = OTHER; note = 2'-fluorocytidine-3'-phosphate
  modified_base 10: mod_base = OTHER; note = 2'-O-methyladenosine-3'-phosphate
  modified_base 11: mod_base = OTHER; note = 2'-fluorocytidine-3'-phosphate
  modified_base 12: mod_base = OTHER; note = 2'-O-methylguanosine-3'-phosphate
  modified_base 13: mod_base = OTHER; note = 2'-fluoroguanosine-3'-phosphorothioate
  modified_base 14: mod_base = OTHER; note = 2'-O-methyladenosine-3'-phosphorothioate
  modified_base 15: mod_base = OTHER; note = 2'-fluoroadenosine-3'-phosphate
acgtacaacacggaa

SEQ ID NO: 170 - RNA, 15 nt, synthetic construct
  source 1..15: mol_type = other RNA
  modified_base 1: mod_base = OTHER; note = 2'-fluoroadenosine-3'-phosphorothioate
  modified_base 2: mod_base = OTHER; note = 2'-O-methylcytidine-3'-phosphorothioate
  modified_base 3: mod_base = OTHER; note = 2'-fluoroadenosine-3'-phosphate
  modified_base 4: mod_base = OTHER; note = 2'-O-methyluridine-3'-phosphate
  modified_base 5: mod_base = OTHER; note = 2'-fluoroadenosine-3'-phosphate
  modified_base 6: mod_base = OTHER; note = 2'-O-methylcytidine-3'-phosphate
  modified_base 7: mod_base = OTHER; note = 2'-fluoroadenosine-3'-phosphate
  modified_base 8: mod_base = OTHER; note = 2'-O-methyladenosine-3'-phosphate
  modified_base 9: mod_base = OTHER; note = 2'-fluorocytidine-3'-phosphate
  modified_base 10: mod_base = OTHER; note = 2'-O-methyladenosine-3'-phosphate
  modified_base 11: mod_base = OTHER; note = 2'-fluorocytidine-3'-phosphate
  modified_base 12: mod_base = OTHER; note = 2'-O-methyladenosine-3'-phosphate
  modified_base 13: mod_base = OTHER; note = 2'-fluoroguanosine-3'-phosphorothioate
  modified_base 14: mod_base = OTHER; note = 2'-O-methyladenosine-3'-phosphorothioate
  modified_base 15: mod_base = OTHER; note = 2'-fluoroadenosine-3'-phosphate
acatacaacacagaa

SEQ ID NO: 171 - RNA, 15 nt, synthetic construct
  source 1..15: mol_type = other RNA
  modified_base 1: mod_base = OTHER; note = 2'-fluoroadenosine-3'-phosphorothioate
  modified_base 2: mod_base = OTHER; note = 2'-O-methylcytidine-3'-phosphorothioate
  modified_base 3: mod_base = OTHER; note = 2'-fluoroguanosine-3'-phosphate
  modified_base 4: mod_base = OTHER; note = 2'-O-methyluridine-3'-phosphate
  modified_base 5: mod_base = OTHER; note = 2'-fluoroadenosine-3'-phosphate
  modified_base 6: mod_base = OTHER; note = 2'-O-methylcytidine-3'-phosphate
  modified_base 7: mod_base = OTHER; note = 2'-fluoroadenosine-3'-phosphate
  modified_base 8: mod_base = OTHER; note = 2'-O-methyladenosine-3'-phosphate
  modified_base 9: mod_base = OTHER; note = 2'-fluorocytidine-3'-phosphate
  modified_base 10: mod_base = OTHER; note = 2'-O-methyladenosine-3'-phosphate
  modified_base 11: mod_base = OTHER; note = 2'-fluorocytidine-3'-phosphate
  modified_base 12: mod_base = OTHER; note = 2'-O-methylguanosine-3'-phosphate
  modified_base 13: mod_base = OTHER; note = 2'-fluoroguanosine-3'-phosphorothioate
  modified_base 14: mod_base = OTHER; note = 2'-O-methyladenosine-3'-phosphorothioate
  modified_base 15: mod_base = OTHER; note = 2'-fluoroadenosine-3'-phosphate
acgtacaacacggaa

SEQ ID NO: 172 - RNA, 15 nt, synthetic construct
  source 1..15: mol_type = other RNA
  modified_base 1: mod_base = OTHER; note = 2'-fluoroadenosine-3'-phosphorothioate
  modified_base 2: mod_base = OTHER; note = 2'-O-methylcytidine-3'-phosphorothioate
  modified_base 3: mod_base = OTHER; note = 2'-fluoroadenosine-3'-phosphate
  modified_base 4: mod_base = OTHER; note = 2'-O-methyluridine-3'-phosphate
  modified_base 5: mod_base = OTHER; note = 2'-fluoroadenosine-3'-phosphate
  modified_base 6: mod_base = OTHER; note = 2'-O-methylcytidine-3'-phosphate
  modified_base 7: mod_base = OTHER; note = 2'-fluoroadenosine-3'-phosphate
  modified_base 8: mod_base = OTHER; note = 2'-O-methyladenosine-3'-phosphate
  modified_base 9: mod_base = OTHER; note = 2'-fluorocytidine-3'-phosphate
  modified_base 10: mod_base = OTHER; note = 2'-O-methyladenosine-3'-phosphate
  modified_base 11: mod_base = OTHER; note = 2'-fluorocytidine-3'-phosphate
  modified_base 12: mod_base = OTHER; note = 2'-O-methylguanosine-3'-phosphate
  modified_base 13: mod_base = OTHER; note = 2'-fluoroguanosine-3'-phosphorothioate
  modified_base 14: mod_base = OTHER; note = 2'-O-methyladenosine-3'-phosphorothioate
  modified_base 15: mod_base = OTHER; note = 2'-fluoroadenosine-3'-phosphate
acatacaacacggaa

SEQ ID NO: 173 - RNA, 15 nt, synthetic construct
  source 1..15: mol_type = other RNA
  modified_base 1: mod_base = OTHER; note = 2'-fluorocytidine-3'-phosphorothioate
  modified_base 2: mod_base = OTHER; note = 2'-O-methylcytidine-3'-phosphorothioate
  modified_base 3: mod_base = OTHER; note = 2'-fluoroadenosine-3'-phosphate
  modified_base 4: mod_base = OTHER; note = 2'-O-methylguanosine-3'-phosphate
  modified_base 5: mod_base = OTHER; note = 2'-fluoroguanosine-3'-phosphate
  modified_base 6: mod_base = OTHER; note = 2'-O-methylguanosine-3'-phosphate
  modified_base 7: mod_base = OTHER; note = 2'-fluorocytidine-3'-phosphate
  modified_base 8: mod_base = OTHER; note = 2'-O-methylguanosine-3'-phosphate
  modified_base 9: mod_base = OTHER; note = 2'-fluoroadenosine-3'-phosphate
  modified_base 10: mod_base = OTHER; note = 2'-O-methylguanosine-3'-phosphate
  modified_base 11: mod_base = OTHER; note = 2'-fluorouridine-3'-phosphate
  modified_base 12: mod_base = OTHER; note = 2'-O-methylguanosine-3'-phosphate
  modified_base 13: mod_base = OTHER; note = 2'-fluoroguanosine-3'-phosphorothioate
  modified_base 14: mod_base = OTHER; note = 2'-O-methyladenosine-3'-phosphorothioate
  modified_base 15: mod_base = OTHER; note = 2'-fluoroadenosine-3'-phosphate
ccagggcgagtggaa

SEQ ID NO: 174 - RNA, 15 nt, synthetic construct
  source 1..15: mol_type = other RNA
  modified_base 1: mod_base = OTHER; note = 2'-fluorocytidine-3'-phosphorothioate
  modified_base 2: mod_base = OTHER; note = 2'-O-methylcytidine-3'-phosphorothioate
  modified_base 3: mod_base = OTHER; note = 2'-fluorocytidine-3'-phosphate
  modified_base 4: mod_base = OTHER; note = 2'-O-methylguanosine-3'-phosphate
  modified_base 5: mod_base = OTHER; note = 2'-fluoroguanosine-3'-phosphate
  modified_base 6: mod_base = OTHER; note = 2'-O-methylguanosine-3'-phosphate
  modified_base 7: mod_base = OTHER; note = 2'-fluorouridine-3'-phosphate
  modified_base 8: mod_base = OTHER; note = 2'-O-methylguanosine-3'-phosphate
  modified_base 9: mod_base = OTHER; note = 2'-fluoroadenosine-3'-phosphate
  modified_base 10: mod_base = OTHER; note = 2'-O-methylguanosine-3'-phosphate
  modified_base 11: mod_base = OTHER; note = 2'-fluorouridine-3'-phosphate
  modified_base 12: mod_base = OTHER; note = 2'-O-methylguanosine-3'-phosphate
  modified_base 13: mod_base = OTHER; note = 2'-fluoroguanosine-3'-phosphorothioate
  modified_base 14: mod_base = OTHER; note = 2'-O-methyladenosine-3'-phosphorothioate
  modified_base 15: mod_base = OTHER; note = 2'-fluoroadenosine-3'-phosphate
cccgggtgagtggaa

SEQ ID NO: 175 - RNA, 15 nt, synthetic construct
  source 1..15: mol_type = other RNA
  modified_base 1: mod_base = OTHER; note = 2'-fluorocytidine-3'-phosphorothioate
  modified_base 2: mod_base = OTHER; note = 2'-O-methylcytidine-3'-phosphorothioate
  modified_base 3: mod_base = OTHER; note = 2'-fluorocytidine-3'-phosphate
  modified_base 4: mod_base = OTHER; note = 2'-O-methylguanosine-3'-phosphate
  modified_base 5: mod_base = OTHER; note = 2'-fluoroguanosine-3'-phosphate
  modified_base 6: mod_base = OTHER; note = 2'-O-methylguanosine-3'-phosphate
  modified_base 7: mod_base = OTHER; note = 2'-fluorouridine-3'-phosphate
  modified_base 8: mod_base = OTHER; note = 2'-O-methyladenosine-3'-phosphate
  modified_base 9: mod_base = OTHER; note = 2'-fluoroadenosine-3'-phosphate
  modified_base 10: mod_base = OTHER; note = 2'-O-methylcytidine-3'-phosphate
  modified_base 11: mod_base = OTHER; note = 2'-fluorouridine-3'-phosphate
  modified_base 12: mod_base = OTHER; note = 2'-O-methylguanosine-3'-phosphate
  modified_base 13: mod_base = OTHER; note = 2'-fluoroguanosine-3'-phosphorothioate
  modified_base 14: mod_base = OTHER; note = 2'-O-methyladenosine-3'-phosphorothioate
  modified_base 15: mod_base = OTHER; note = 2'-fluoroadenosine-3'-phosphate
cccgggtaactggaa

SEQ ID NO: 176 - RNA, 21 nt, synthetic construct
  source 1..21: mol_type = other RNA
  modified_base 1: mod_base = OTHER; note = 2'-O-methyluridine-3'-phosphorothioate
  modified_base 2: mod_base = OTHER; note = 2'-fluorouridine-3'-phosphorothioate
  modified_base 3: mod_base = OTHER; note = 2'-O-methylcytidine-3'-phosphate
  modified_base 4: mod_base = OTHER; note = 2'-fluoroadenosine-3'-phosphate
  modified_base 5: mod_base = OTHER; note = 2'-O-methylguanosine-3'-phosphate
  modified_base 6: mod_base = OTHER; note = 2'-fluorocytidine-3'-phosphate
  modified_base 7: mod_base = OTHER; note = 2'-O-methyladenosine-3'-phosphate
  modified_base 8: mod_base = OTHER; note = 2'-fluorouridine-3'-phosphate
  modified_base 9: mod_base = OTHER; note = 2'-O-methyluridine-3'-phosphate
  modified_base 10: mod_base = OTHER; note = 2'-fluorocytidine-3'-phosphate
  modified_base 11: mod_base = OTHER; note = 2'-O-methyluridine-3'-phosphate
  modified_base 12: mod_base = OTHER; note = 2'-fluoroguanosine-3'-phosphate
  modified_base 13: mod_base = OTHER; note = 2'-O-methyladenosine-3'-phosphate
  modified_base 14: mod_base = OTHER; note = 2'-fluorouridine-3'-phosphorothioate
  modified_base 15: mod_base = OTHER; note = 2'-O-methylcytidine-3'-phosphorothioate
  modified_base 16: mod_base = OTHER; note = 2'-fluorouridine-3'-phosphorothioate
  modified_base 17: mod_base = OTHER; note = 2'-O-methylcytidine-3'-phosphorothioate
  modified_base 18: mod_base = OTHER; note = 2'-fluorocytidine-3'-phosphorothioate
  modified_base 19: mod_base = OTHER; note = 2'-O-methyluridine-3'-phosphorothioate
  modified_base 20: mod_base = OTHER; note = 2'-O-methylguanosine-3'-phosphorothioate
  modified_base 21: mod_base = OTHER; note = 2'-fluoroguanosine-3'-phosphate
ttcagcattctgatctcctgg

SEQ ID NO: 177 - RNA, 21 nt, synthetic construct
  source 1..21: mol_type = other RNA
  modified_base 1: mod_base = OTHER; note = 2'-O-methyluridine-3'-phosphorothioate
  modified_base 2: mod_base = OTHER; note = 2'-fluorouridine-3'-phosphorothioate
  modified_base 3: mod_base = OTHER; note = 2'-O-methylcytidine-3'-phosphate
  modified_base 4: mod_base = OTHER; note = 2'-fluoroadenosine-3'-phosphate
  modified_base 5: mod_base = OTHER; note = 2'-O-methylguanosine-3'-phosphate
  modified_base 6: mod_base = OTHER; note = 2'-fluorocytidine-3'-phosphate
  modified_base 7: mod_base = OTHER; note = 2'-O-methyladenosine-3'-phosphate
  modified_base 8: mod_base = OTHER; note = 2'-fluorouridine-3'-phosphate
  modified_base 9: mod_base = OTHER; note = 2'-O-methyluridine-3'-phosphate
  modified_base 10: mod_base = OTHER; note = 2'-fluorocytidine-3'-phosphate
  modified_base 11: mod_base = OTHER; note = 2'-O-methyluridine-3'-phosphate
  modified_base 12: mod_base = OTHER; note = 2'-fluoroguanosine-3'-phosphate
  modified_base 13: mod_base = OTHER; note = 2'-O-methyladenosine-3'-phosphate
  modified_base 14: mod_base = OTHER; note = 2'-fluorouridine-3'-phosphorothioate
  modified_base 15: mod_base = OTHER; note = 2'-O-methylcytidine-3'-phosphorothioate
  modified_base 16: mod_base = OTHER; note = 2'-fluorouridine-3'-phosphorothioate
  modified_base 17: mod_base = OTHER; note = 2'-O-methylcytidine-3'-phosphorothioate
  modified_base 18: mod_base = OTHER; note = 2'-fluorocytidine-3'-phosphorothioate
  modified_base 19: mod_base = OTHER; note = 2'-O-methyluridine-3'-phosphorothioate
  modified_base 20: mod_base = OTHER; note = 2'-O-methylguanosine-3'-phosphorothioate
  modified_base 21: mod_base = OTHER; note = 2'-fluoroadenosine-3'-phosphate
ttcagcattctgatctcctga

SEQ ID NO: 178 - RNA, 21 nt, synthetic construct
  source 1..21: mol_type = other RNA
  modified_base 1: mod_base = OTHER; note = 2'-O-methyluridine-3'-phosphorothioate
  modified_base 2: mod_base = OTHER; note = 2'-fluorouridine-3'-phosphorothioate
  modified_base 3: mod_base = OTHER; note = 2'-O-methylcytidine-3'-phosphate
  modified_base 4: mod_base = OTHER; note = 2'-fluorouridine-3'-phosphate
  modified_base 5: mod_base = OTHER; note = 2'-O-methyluridine-3'-phosphate
  modified_base 6: mod_base = OTHER; note = 2'-fluorocytidine-3'-phosphate
  modified_base 7: mod_base = OTHER; note = 2'-O-methyladenosine-3'-phosphate
  modified_base 8: mod_base = OTHER; note = 2'-fluoroguanosine-3'-phosphate
  modified_base 9: mod_base = OTHER; note = 2'-O-methylcytidine-3'-phosphate
  modified_base 10: mod_base = OTHER; note = 2'-fluoroadenosine-3'-phosphate
  modified_base 11: mod_base = OTHER; note = 2'-O-methyluridine-3'-phosphate
  modified_base 12: mod_base = OTHER; note = 2'-fluorouridine-3'-phosphate
  modified_base 13: mod_base = OTHER; note = 2'-O-methylcytidine-3'-phosphate
  modified_base 14: mod_base = OTHER; note = 2'-fluorouridine-3'-phosphorothioate
  modified_base 15: mod_base = OTHER; note = 2'-O-methylguanosine-3'-phosphorothioate
  modified_base 16: mod_base = OTHER; note = 2'-fluoroadenosine-3'-phosphorothioate
  modified_base 17: mod_base = OTHER; note = 2'-O-methyluridine-3'-phosphorothioate
  modified_base 18: mod_base = OTHER; note = 2'-fluorocytidine-3'-phosphorothioate
  modified_base 19: mod_base = OTHER; note = 2'-O-methyluridine-3'-phosphorothioate
  modified_base 20: mod_base = OTHER; note = 2'-O-methylcytidine-3'-phosphorothioate
  modified_base 21: mod_base = OTHER; note = 2'-fluorocytidine-3'-phosphate
ttcttcagcattctgatctcc

SEQ ID NO: 179 - RNA, 21 nt, synthetic construct
  source 1..21: mol_type = other RNA
  modified_base 1: mod_base = OTHER; note = 2'-O-methyluridine-3'-phosphorothioate
  modified_base 2: mod_base = OTHER; note = 2'-fluorouridine-3'-phosphorothioate
  modified_base 3: mod_base = OTHER; note = 2'-O-methylcytidine-3'-phosphate
  modified_base 4: mod_base = OTHER; note = 2'-fluorocytidine-3'-phosphate
  modified_base 5: mod_base = OTHER; note = 2'-O-methylguanosine-3'-phosphate
  modified_base 6: mod_base = OTHER; note = 2'-fluorouridine-3'-phosphate
  modified_base 7: mod_base = OTHER; note = 2'-O-methylguanosine-3'-phosphate
  modified_base 8: mod_base = OTHER; note = 2'-fluorouridine-3'-phosphate
  modified_base 9: mod_base = OTHER; note = 2'-O-methyluridine-3'-phosphate
  modified_base 10: mod_base = OTHER; note = 2'-fluoroguanosine-3'-phosphate
  modified_base 11: mod_base = OTHER; note = 2'-O-methyluridine-3'-phosphate
  modified_base 12: mod_base = OTHER; note = 2'-fluoroadenosine-3'-phosphate
  modified_base 13: mod_base = OTHER; note = 2'-O-methylcytidine-3'-phosphate
  modified_base 14: mod_base = OTHER; note = 2'-fluoroguanosine-3'-phosphorothioate
  modified_base 15: mod_base = OTHER; note = 2'-O-methyluridine-3'-phosphorothioate
  modified_base 16: mod_base = OTHER; note = 2'-fluoroguanosine-3'-phosphorothioate
  modified_base 17: mod_base = OTHER; note = 2'-O-methylcytidine-3'-phosphorothioate
  modified_base 18: mod_base = OTHER; note = 2'-fluoroadenosine-3'-phosphorothioate
  modified_base 19: mod_base = OTHER; note = 2'-O-methylguanosine-3'-phosphorothioate
  modified_base 20: mod_base = OTHER; note = 2'-O-methylguanosine-3'-phosphorothioate
  modified_base 21: mod_base = OTHER; note = 2'-fluoroadenosine-3'-phosphate
ttccgtgttgtacgtgcagga

SEQ ID NO: 180 - RNA, 21 nt, synthetic construct
  source 1..21: mol_type = other RNA
  modified_base 1: mod_base = OTHER; note = 2'-O-methyluridine-3'-phosphorothioate
  modified_base 2: mod_base = OTHER; note = 2'-fluorouridine-3'-phosphorothioate
  modified_base 3: mod_base = OTHER; note = 2'-O-methylcytidine-3'-phosphate
  modified_base 4: mod_base = OTHER; note = 2'-fluorouridine-3'-phosphate
  modified_base 5: mod_base = OTHER; note = 2'-O-methylguanosine-3'-phosphate
  modified_base 6: mod_base = OTHER; note = 2'-fluorouridine-3'-phosphate
  modified_base 7: mod_base = OTHER; note = 2'-O-methylguanosine-3'-phosphate
  modified_base 8: mod_base = OTHER; note = 2'-fluorouridine-3'-phosphate
  modified_base 9: mod_base = OTHER; note = 2'-O-methyluridine-3'-phosphate
  modified_base 10: mod_base = OTHER; note = 2'-fluoroguanosine-3'-phosphate
  modified_base 11: mod_base = OTHER; note = 2'-O-methyluridine-3'-phosphate
  modified_base 12: mod_base = OTHER; note = 2'-fluoroadenosine-3'-phosphate
  modified_base 13: mod_base = OTHER; note = 2'-O-methyluridine-3'-phosphate
  modified_base 14: mod_base = OTHER; note = 2'-fluoroguanosine-3'-phosphorothioate
  modified_base 15: mod_base = OTHER; note = 2'-O-methyluridine-3'-phosphorothioate
  modified_base 16: mod_base = OTHER; note = 2'-fluoroadenosine-3'-phosphorothioate
  modified_base 17: mod_base = OTHER; note = 2'-O-methylcytidine-3'-phosphorothioate
  modified_base 18: mod_base = OTHER; note = 2'-fluoroadenosine-3'-phosphorothioate
  modified_base 19: mod_base = OTHER; note = 2'-O-methylguanosine-3'-phosphorothioate
  modified_base 20: mod_base = OTHER; note = 2'-O-methylguanosine-3'-phosphorothioate
  modified_base 21: mod_base = OTHER; note = 2'-fluoroadenosine-3'-phosphate
ttctgtgttgtatgtacagga

SEQ ID NO: 181 - RNA, 21 nt, synthetic construct
  source 1..21: mol_type = other RNA
  modified_base 1: mod_base = OTHER; note = 2'-O-methyluridine-3'-phosphorothioate
  modified_base 2: mod_base = OTHER; note = 2'-fluorouridine-3'-phosphorothioate
  modified_base 3: mod_base = OTHER; note = 2'-O-methylcytidine-3'-phosphate
  modified_base 4: mod_base = OTHER; note = 2'-fluorocytidine-3'-phosphate
  modified_base 5: mod_base = OTHER; note = 2'-O-methylguanosine-3'-phosphate
  modified_base 6: mod_base = OTHER; note = 2'-fluorouridine-3'-phosphate
  modified_base 7: mod_base = OTHER; note = 2'-O-methylguanosine-3'-phosphate
  modified_base 8: mod_base = OTHER; note = 2'-fluorouridine-3'-phosphate
  modified_base 9: mod_base = OTHER; note = 2'-O-methyluridine-3'-phosphate
  modified_base 10: mod_base = OTHER; note = 2'-fluoroguanosine-3'-phosphate
  modified_base 11: mod_base = OTHER; note = 2'-O-methyluridine-3'-phosphate
  modified_base 12: mod_base = OTHER; note = 2'-fluoroadenosine-3'-phosphate
  modified_base 13: mod_base = OTHER; note = 2'-O-methylcytidine-3'-phosphate
  modified_base 14: mod_base = OTHER; note = 2'-fluoroguanosine-3'-phosphorothioate
  modified_base 15: mod_base = OTHER; note = 2'-O-methyluridine-3'-phosphorothioate
  modified_base 16: mod_base = OTHER; note = 2'-fluoroguanosine-3'-phosphorothioate
  modified_base 17: mod_base = OTHER; note = 2'-O-methylcytidine-3'-phosphorothioate
  modified_base 18: mod_base = OTHER; note = 2'-fluoroadenosine-3'-phosphorothioate
  modified_base 19: mod_base = OTHER; note = 2'-O-methylguanosine-3'-phosphorothioate
  modified_base 20: mod_base = OTHER; note = 2'-O-methylguanosine-3'-phosphorothioate
  modified_base 21: mod_base = OTHER; note = 2'-fluoroadenosine-3'-phosphate
ttccgtgttgtacgtgcagga

SEQ ID NO: 182 - RNA, 21 nt, synthetic construct
  source 1..21: mol_type = other RNA
  modified_base 1: mod_base = OTHER; note = 2'-O-methyluridine-3'-phosphorothioate
  modified_base 2: mod_base = OTHER; note = 2'-fluorouridine-3'-phosphorothioate
  modified_base 3: mod_base = OTHER; note = 2'-O-methylcytidine-3'-phosphate
  modified_base 4: mod_base = OTHER; note = 2'-fluorocytidine-3'-phosphate
  modified_base 5: mod_base = OTHER; note = 2'-O-methylguanosine-3'-phosphate
  modified_base 6: mod_base = OTHER; note = 2'-fluorouridine-3'-phosphate
  modified_base 7: mod_base = OTHER; note = 2'-O-methylguanosine-3'-phosphate
  modified_base 8: mod_base = OTHER; note = 2'-fluorouridine-3'-phosphate
  modified_base 9: mod_base = OTHER; note = 2'-O-methyluridine-3'-phosphate
  modified_base 10: mod_base = OTHER; note = 2'-fluoroguanosine-3'-phosphate
  modified_base 11: mod_base = OTHER; note = 2'-O-methyluridine-3'-phosphate
  modified_base 12: mod_base = OTHER; note = 2'-fluoroadenosine-3'-phosphate
  modified_base 13: mod_base = OTHER; note = 2'-O-methyluridine-3'-phosphate
  modified_base 14: mod_base = OTHER; note = 2'-fluoroguanosine-3'-phosphorothioate
  modified_base 15: mod_base = OTHER; note = 2'-O-methyluridine-3'-phosphorothioate
  modified_base 16: mod_base = OTHER; note = 2'-fluoroguanosine-3'-phosphorothioate
  modified_base 17: mod_base = OTHER; note = 2'-O-methylcytidine-3'-phosphorothioate
  modified_base 18: mod_base = OTHER; note = 2'-fluoroadenosine-3'-phosphorothioate
  modified_base 19: mod_base = OTHER; note = 2'-O-methyladenosine-3'-phosphorothioate
  modified_base 20: mod_base = OTHER; note = 2'-O-methylguanosine-3'-phosphorothioate
  modified_base 21: mod_base = OTHER; note = 2'-fluoroadenosine-3'-phosphate
ttccgtgttgtatgtgcaaga

SEQ ID NO: 183 - RNA, 21 nt, synthetic construct
  source 1..21: mol_type = other RNA
  modified_base 1: mod_base = OTHER; note = 2'-O-methyluridine-3'-phosphorothioate
  modified_base 2: mod_base = OTHER; note = 2'-fluorouridine-3'-phosphorothioate
  modified_base 3: mod_base = OTHER; note = 2'-O-methylcytidine-3'-phosphate
  modified_base 4: mod_base = OTHER; note = 2'-fluorouridine-3'-phosphate
  modified_base 5: mod_base = OTHER; note = 2'-O-methylguanosine-3'-phosphate
  modified_base 6: mod_base = OTHER; note = 2'-fluorouridine-3'-phosphate
  modified_base 7: mod_base = OTHER; note = 2'-O-methylguanosine-3'-phosphate
  modified_base 8: mod_base = OTHER; note = 2'-fluorouridine-3'-phosphate
  modified_base 9: mod_base = OTHER; note = 2'-O-methyluridine-3'-phosphate
  modified_base 10: mod_base = OTHER; note = 2'-fluoroguanosine-3'-phosphate
  modified_base 11: mod_base = OTHER; note = 2'-O-methyluridine-3'-phosphate
  modified_base 12: mod_base = OTHER; note = 2'-fluoroadenosine-3'-phosphate
  modified_base 13: mod_base = OTHER; note = 2'-O-methylcytidine-3'-phosphate
  modified_base 14: mod_base = OTHER; note = 2'-fluoroguanosine-3'-phosphorothioate
  modified_base 15: mod_base = OTHER; note = 2'-O-methyluridine-3'-phosphorothioate
  modified_base 16: mod_base = OTHER; note = 2'-fluoroadenosine-3'-phosphorothioate
  modified_base 17: mod_base = OTHER; note = 2'-O-methylcytidine-3'-phosphorothioate
  modified_base 18: mod_base = OTHER; note = 2'-fluoroadenosine-3'-phosphorothioate
  modified_base 19: mod_base = OTHER; note = 2'-O-methylguanosine-3'-phosphorothioate
  modified_base 20: mod_base = OTHER; note = 2'-O-methylguanosine-3'-phosphorothioate
  modified_base 21: mod_base = OTHER; note = 2'-fluoroadenosine-3'-phosphate
ttctgtgttgtacgtacagga

SEQ ID NO: 184 - RNA, 21 nt, synthetic construct
  source 1..21: mol_type = other RNA
  modified_base 1: mod_base = OTHER; note = 2'-O-methyluridine-3'-phosphorothioate
  modified_base 2: mod_base = OTHER; note = 2'-fluorouridine-3'-phosphorothioate
  modified_base 3: mod_base = OTHER; note = 2'-O-methylcytidine-3'-phosphate
  modified_base 4: mod_base = OTHER; note = 2'-fluorouridine-3'-phosphate
  modified_base 5: mod_base = OTHER; note = 2'-O-methylguanosine-3'-phosphate
  modified_base 6: mod_base = OTHER; note = 2'-fluorouridine-3'-phosphate
  modified_base 7: mod_base = OTHER; note = 2'-O-methylguanosine-3'-phosphate
  modified_base 8: mod_base = OTHER; note = 2'-fluorouridine-3'-phosphate
  modified_base 9: mod_base = OTHER; note = 2'-O-methyluridine-3'-phosphate
  modified_base 10: mod_base = OTHER; note = 2'-fluoroguanosine-3'-phosphate
  modified_base 11: mod_base = OTHER; note = 2'-O-methyluridine-3'-phosphate
  modified_base 12: mod_base = OTHER; note = 2'-fluoroadenosine-3'-phosphate
  modified_base 13: mod_base = OTHER; note = 2'-O-methyluridine-3'-phosphate
  modified_base 14: mod_base = OTHER; note = 2'-fluoroguanosine-3'-phosphorothioate
  modified_base 15: mod_base = OTHER; note = 2'-O-methyluridine-3'-phosphorothioate
  modified_base 16: mod_base = OTHER; note = 2'-fluoroguanosine-3'-phosphorothioate
  modified_base 17: mod_base = OTHER; note = 2'-O-methylcytidine-3'-phosphorothioate
  modified_base 18: mod_base = OTHER; note = 2'-fluoroadenosine-3'-phosphorothioate
  modified_base 19: mod_base = OTHER; note = 2'-O-methyluridine-3'-phosphorothioate
  modified_base 20: mod_base = OTHER; note = 2'-O-methylguanosine-3'-phosphorothioate
  modified_base 21: mod_base = OTHER; note = 2'-fluoroadenosine-3'-phosphate
ttctgtgttgtatgtgcatga

SEQ ID NO: 185 - RNA, 21 nt, synthetic construct
  source 1..21: mol_type = other RNA
  modified_base 1: mod_base = OTHER; note = 2'-O-methyluridine-3'-phosphorothioate
  modified_base 2: mod_base = OTHER; note = 2'-fluorouridine-3'-phosphorothioate
  modified_base 3: mod_base = OTHER; note = 2'-O-methylcytidine-3'-phosphate
  modified_base 4: mod_base = OTHER; note = 2'-fluorocytidine-3'-phosphate
  modified_base 5: mod_base = OTHER; note = 2'-O-methyladenosine-3'-phosphate
  modified_base 6: mod_base = OTHER; note = 2'-fluorouridine-3'-phosphate
  modified_base 7: mod_base = OTHER; note = 2'-O-methyluridine-3'-phosphate
  modified_base 8: mod_base = OTHER; note = 2'-fluorocytidine-3'-phosphate
  modified_base 9: mod_base = OTHER; note = 2'-O-methyladenosine-3'-phosphate
  modified_base 10: mod_base = OTHER; note = 2'-fluorocytidine-3'-phosphate
  modified_base 11: mod_base = OTHER; note = 2'-O-methylcytidine-3'-phosphate
  modified_base 12: mod_base = OTHER; note = 2'-fluorocytidine-3'-phosphate
  modified_base 13: mod_base = OTHER; note = 2'-O-methylguanosine-3'-phosphate
  modified_base 14: mod_base = OTHER; note = 2'-fluoroguanosine-3'-phosphorothioate
  modified_base 15: mod_base = OTHER; note = 2'-O-methylguanosine-3'-phosphorothioate
  modified_base 16: mod_base = OTHER; note = 2'-fluoroadenosine-3'-phosphorothioate
  modified_base 17: mod_base = OTHER; note = 2'-O-methyladenosine-3'-phosphorothioate
  modified_base 18: mod_base = OTHER; note = 2'-fluoroguanosine-3'-phosphorothioate
  modified_base 19: mod_base = OTHER; note = 2'-O-methylcytidine-3'-phosphorothioate
  modified_base 20: mod_base = OTHER; note = 2'-O-methylguanosine-3'-phosphorothioate
  modified_base 21: mod_base = OTHER; note = 2'-fluoroguanosine-3'-phosphate
ttccattcacccgggaagcgg

SEQ ID NO: 186 - RNA, 21 nt, synthetic construct
  source 1..21: mol_type = other RNA
  modified_base 1: mod_base = OTHER; note = 2'-O-methyluridine-3'-phosphorothioate
  modified_base 2: mod_base = OTHER; note = 2'-fluorouridine-3'-phosphorothioate
  modified_base 3: mod_base = OTHER; note = 2'-O-methylcytidine-3'-phosphate
  modified_base 4: mod_base = OTHER; note = 2'-fluorocytidine-3'-phosphate
  modified_base 5: mod_base = OTHER; note = 2'-O-methyladenosine-3'-phosphate
  modified_base 6: mod_base = OTHER; note = 2'-fluorouridine-3'-phosphate
  modified_base 7: mod_base = OTHER; note = 2'-O-methyluridine-3'-phosphate
  modified_base 8: mod_base = OTHER; note = 2'-fluorouridine-3'-phosphate
  modified_base 9: mod_base = OTHER; note = 2'-O-methyladenosine-3'-phosphate
  modified_base 10: mod_base = OTHER; note = 2'-fluorocytidine-3'-phosphate
  modified_base 11: mod_base = OTHER; note = 2'-O-methylcytidine-3'-phosphate
  modified_base 12: mod_base = OTHER; note = 2'-fluorocytidine-3'-phosphate
  modified_base 13: mod_base = OTHER; note = 2'-O-methylguanosine-3'-phosphate
  modified_base 14: mod_base = OTHER; note = 2'-fluoroguanosine-3'-phosphorothioate
  modified_base 15: mod_base = OTHER; note = 2'-O-methylguanosine-3'-phosphorothioate
  modified_base 16: mod_base = OTHER; note = 2'-fluoroadenosine-3'-phosphorothioate
  modified_base 17: mod_base = OTHER; note = 2'-O-methyladenosine-3'-phosphorothioate
  modified_base 18: mod_base = OTHER; note = 2'-fluoroguanosine-3'-phosphorothioate
  modified_base 19: mod_base = OTHER; note = 2'-O-methylcytidine-3'-phosphorothioate
  modified_base 20: mod_base = OTHER; note = 2'-O-methylguanosine-3'-phosphorothioate
  modified_base 21: mod_base = OTHER; note = 2'-fluoroguanosine-3'-phosphate
ttccatttacccgggaagcgg

SEQ ID NO: 187 - RNA, 21 nt, synthetic construct
  source 1..21: mol_type = other RNA
  modified_base 1: mod_base = OTHER; note = 2'-O-methyluridine-3'-phosphorothioate
  modified_base 2: mod_base = OTHER; note = 2'-fluorouridine-3'-phosphorothioate
  modified_base 3: mod_base = OTHER; note = 2'-O-methylcytidine-3'-phosphate
  modified_base 4: mod_base = OTHER; note = 2'-fluorocytidine-3'-phosphate
  modified_base 5: mod_base = OTHER; note = 2'-O-methyladenosine-3'-phosphate
  modified_base 6: mod_base = OTHER; note = 2'-fluorouridine-3'-phosphate
  modified_base 7: mod_base = OTHER; note = 2'-O-methyluridine-3'-phosphate
  modified_base 8: mod_base = OTHER; note = 2'-fluorocytidine-3'-phosphate
  modified_base 9: mod_base = OTHER; note = 2'-O-methyladenosine-3'-phosphate
  modified_base 10: mod_base = OTHER; note = 2'-fluorocytidine-3'-phosphate
  modified_base 11: mod_base = OTHER; note = 2'-O-methylcytidine-3'-phosphate
  modified_base 12: mod_base = OTHER; note = 2'-fluorocytidine-3'-phosphate
  modified_base 13: mod_base = OTHER; note = 2'-O-methyluridine-3'-phosphate
  modified_base 14: mod_base = OTHER; note = 2'-fluoroguanosine-3'-phosphorothioate
  modified_base 15: mod_base = OTHER; note = 2'-O-methylguanosine-3'-phosphorothioate
  modified_base 16: mod_base = OTHER; note = 2'-fluoroadenosine-3'-phosphorothioate
  modified_base 17: mod_base = OTHER; note = 2'-O-methyladenosine-3'-phosphorothioate
  modified_base 18: mod_base = OTHER; note = 2'-fluorouridine-3'-phosphorothioate
  modified_base 19: mod_base = OTHER; note = 2'-O-methylcytidine-3'-phosphorothioate
  modified_base 20: mod_base = OTHER; note = 2'-O-methylguanosine-3'-phosphorothioate
  modified_base 21: mod_base = OTHER; note = 2'-fluorocytidine-3'-phosphate
ttccattcaccctggaatcgc

SEQ ID NO: 188 - RNA, 21 nt, synthetic construct
  source 1..21: mol_type = other RNA
  modified_base 1: mod_base = OTHER; note = 2'-O-methyluridine-3'-phosphorothioate
  modified_base 2: mod_base = OTHER; note = 2'-fluorouridine-3'-phosphorothioate
  modified_base 3: mod_base = OTHER; note = 2'-O-methylcytidine-3'-phosphate
  modified_base 4: mod_base = OTHER; note = 2'-fluorocytidine-3'-phosphate
  modified_base 5: mod_base = OTHER; note = 2'-O-methyladenosine-3'-phosphate
  modified_base 6: mod_base = OTHER; note = 2'-fluorocytidine-3'-phosphate
  modified_base 7: mod_base = OTHER; note = 2'-O-methyluridine-3'-phosphate
  modified_base 8: mod_base = OTHER; note = 2'-fluorocytidine-3'-phosphate
  modified_base 9: mod_base = OTHER; note = 2'-O-methylguanosine-3'-phosphate
  modified_base 10: mod_base = OTHER; note = 2'-fluorocytidine-3'-phosphate
  modified_base 11: mod_base = OTHER; note = 2'-O-methylcytidine-3'-phosphate
  modified_base 12: mod_base = OTHER; note = 2'-fluorocytidine-3'-phosphate
  modified_base 13: mod_base = OTHER; note = 2'-O-methyluridine-3'-phosphate
  modified_base 14: mod_base = OTHER; note = 2'-fluoroguanosine-3'-phosphorothioate
  modified_base 15: mod_base = OTHER; note = 2'-O-methylguanosine-3'-phosphorothioate
  modified_base 16: mod_base = OTHER; note = 2'-fluoroadenosine-3'-phosphorothioate
  modified_base 17: mod_base = OTHER; note = 2'-O-methyladenosine-3'-phosphorothioate
  modified_base 18: mod_base = OTHER; note = 2'-fluoroguanosine-3'-phosphorothioate
  modified_base 19: mod_base = OTHER; note = 2'-O-methylcytidine-3'-phosphorothioate
  modified_base 20: mod_base = OTHER; note = 2'-O-methylguanosine-3'-phosphorothioate
  modified_base 21: mod_base = OTHER; note = 2'-fluoroguanosine-3'-phosphate
ttccactcgccctggaagcgg

SEQ ID NO: 189 - RNA, 21 nt, synthetic construct
  source 1..21: mol_type = other RNA
  modified_base 1: mod_base = OTHER; note = 2'-O-methyluridine-3'-phosphorothioate
  modified_base 2: mod_base = OTHER; note = 2'-fluorouridine-3'-phosphorothioate
  modified_base 3: mod_base = OTHER; note = 2'-O-methylcytidine-3'-phosphate
  modified_base 4: mod_base = OTHER; note = 2'-fluorocytidine-3'-phosphate
  modified_base 5: mod_base = OTHER; note = 2'-O-methyladenosine-3'-phosphate
  modified_base 6: mod_base = OTHER; note = 2'-fluorocytidine-3'-phosphate
  modified_base 7: mod_base = OTHER; note = 2'-O-methyluridine-3'-phosphate
  modified_base 8: mod_base = OTHER; note = 2'-fluorocytidine-3'-phosphate
  modified_base 9: mod_base = OTHER; note = 2'-O-methyladenosine-3'-phosphate
  modified_base 10: mod_base = OTHER; note = 2'-fluorocytidine-3'-phosphate
  modified_base 11: mod_base = OTHER; note = 2'-O-methylcytidine-3'-phosphate
  modified_base 12: mod_base = OTHER; note = 2'-fluorocytidine-3'-phosphate
  modified_base 13: mod_base = OTHER; note = 2'-O-methylguanosine-3'-phosphate
  modified_base 14: mod_base = OTHER; note = 2'-fluoroguanosine-3'-phosphorothioate
  modified_base 15: mod_base = OTHER; note = 2'-O-methylguanosine-3'-phosphorothioate
  modified_base 16: mod_base = OTHER; note = 2'-fluoroadenosine-3'-phosphorothioate
  modified_base 17: mod_base = OTHER; note = 2'-O-methyladenosine-3'-phosphorothioate
  modified_base 18: mod_base = OTHER; note = 2'-fluoroguanosine-3'-phosphorothioate
  modified_base 19: mod_base = OTHER; note = 2'-O-methylcytidine-3'-phosphorothioate
  modified_base 20: mod_base = OTHER; note = 2'-O-methylguanosine-3'-phosphorothioate
  modified_base 21: mod_base = OTHER; note = 2'-fluoroguanosine-3'-phosphate
ttccactcacccgggaagcgg

SEQ ID NO: 190 - RNA, 21 nt, synthetic construct
  source 1..21: mol_type = other RNA
  modified_base 1: mod_base = OTHER; note = 2'-O-methyluridine-3'-phosphorothioate
  modified_base 2: mod_base = OTHER; note = 2'-fluorouridine-3'-phosphorothioate
  modified_base 3: mod_base = OTHER; note = 2'-O-methylcytidine-3'-phosphate
  modified_base 4: mod_base = OTHER; note = 2'-fluorocytidine-3'-phosphate
  modified_base 5: mod_base = OTHER; note = 2'-O-methyladenosine-3'-phosphate
  modified_base 6: mod_base = OTHER; note = 2'-fluoroguanosine-3'-phosphate
  modified_base 7: mod_base = OTHER; note = 2'-O-methyluridine-3'-phosphate
  modified_base 8: mod_base = OTHER; note = 2'-fluorouridine-3'-phosphate
  modified_base 9: mod_base = OTHER; note = 2'-O-methyladenosine-3'-phosphate
  modified_base 10: mod_base = OTHER; note = 2'-fluorocytidine-3'-phosphate
  modified_base 11: mod_base = OTHER; note = 2'-O-methylcytidine-3'-phosphate
  modified_base 12: mod_base = OTHER; note = 2'-fluorocytidine-3'-phosphate
  modified_base 13: mod_base = OTHER; note = 2'-O-methylguanosine-3'-phosphate
  modified_base 14: mod_base = OTHER; note = 2'-fluoroguanosine-3'-phosphorothioate
  modified_base 15: mod_base = OTHER; note = 2'-O-methylguanosine-3'-phosphorothioate
  modified_base 16: mod_base = OTHER; note = 2'-fluoroadenosine-3'-phosphorothioate
  modified_base 17: mod_base = OTHER; note = 2'-O-methyladenosine-3'-phosphorothioate
  modified_base 18: mod_base = OTHER; note = 2'-fluoroguanosine-3'-phosphorothioate
  modified_base 19: mod_base = OTHER; note = 2'-O-methylcytidine-3'-phosphorothioate
  modified_base 20: mod_base = OTHER; note = 2'-O-methylguanosine-3'-phosphorothioate
  modified_base 21: mod_base = OTHER; note = 2'-fluoroguanosine-3'-phosphate
ttccagttacccgggaagcgg

SEQ ID NO: 191 - RNA, 21 nt, synthetic construct
  source 1..21: mol_type = other RNA
  modified_base 1: mod_base = OTHER; note = 2'-O-methyluridine-3'-phosphorothioate
  modified_base 2: mod_base = OTHER; note = 2'-fluorouridine-3'-phosphorothioate
  modified_base 3: mod_base = OTHER; note = 2'-O-methylcytidine-3'-phosphate
  modified_base 4: mod_base = OTHER; note = 2'-fluoroadenosine-3'-phosphate
  modified_base 5: mod_base = OTHER; note = 2'-O-methylguanosine-3'-phosphate
  modified_base 6: mod_base = OTHER; note = 2'-fluorocytidine-3'-phosphate
  modified_base 7: mod_base = OTHER; note = 2'-O-methyladenosine-3'-phosphate
  modified_base 8: mod_base = OTHER; note = 2'-fluorouridine-3'-phosphate
  modified_base 9: mod_base = OTHER; note = 2'-O-methyluridine-3'-phosphate
  modified_base 10: mod_base = OTHER; note = 2'-fluorocytidine-3'-phosphate
  modified_base 11: mod_base = OTHER; note = 2'-O-methyluridine-3'-phosphate
  modified_base 12: mod_base = OTHER; note = 2'-fluoroguanosine-3'-phosphate
  modified_base 13: mod_base = OTHER; note = 2'-O-methyladenosine-3'-phosphate
  modified_base 14: mod_base = OTHER; note = 2'-fluorouridine-3'-phosphorothioate
  modified_base 15: mod_base = OTHER; note = 2'-O-methylcytidine-3'-phosphorothioate
  modified_base 16: mod_base = OTHER; note = 2'-fluorouridine-3'-phosphorothioate
  modified_base 17: mod_base = OTHER; note = 2'-O-methylcytidine-3'-phosphorothioate
  modified_base 18: mod_base = OTHER; note = 2'-fluorocytidine-3'-phosphorothioate
  modified_base 19: mod_base = OTHER; note = 2'-fluorouridine-3'-phosphorothioate
  modified_base 20: mod_base = OTHER; note = 2'-O-methylguanosine-3'-phosphorothioate
  modified_base 21: mod_base = OTHER; note = 2'-O-methylguanosine-3'-phosphate
ttcagcattctgatctcctgg

SEQ ID NO: 192 - RNA, 21 nt, synthetic construct
  source 1..21: mol_type = other RNA
  modified_base 1: mod_base = OTHER; note = 2'-O-methyluridine-3'-phosphorothioate
  modified_base 2: mod_base = OTHER; note = 2'-fluorouridine-3'-phosphorothioate
  modified_base 3: mod_base = OTHER; note = 2'-O-methylcytidine-3'-phosphate
  modified_base 4: mod_base = OTHER; note = 2'-fluoroadenosine-3'-phosphate
  modified_base 5: mod_base = OTHER; note = 2'-O-methylguanosine-3'-phosphate
  modified_base 6: mod_base = OTHER; note = 2'-fluorocytidine-3'-phosphate
  modified_base 7: mod_base = OTHER; note = 2'-O-methyladenosine-3'-phosphate
  modified_base 8: mod_base = OTHER; note = 2'-fluorouridine-3'-phosphate
  modified_base 9: mod_base = OTHER; note = 2'-O-methyluridine-3'-phosphate
  modified_base 10: mod_base = OTHER; note = 2'-fluorocytidine-3'-phosphate
  modified_base 11: mod_base = OTHER; note = 2'-O-methyluridine-3'-phosphate
  modified_base 12: mod_base = OTHER; note = 2'-fluoroguanosine-3'-phosphate
  modified_base 13: mod_base = OTHER; note = 2'-O-methyladenosine-3'-phosphate
  modified_base 14: mod_base = OTHER; note = 2'-fluorouridine-3'-phosphorothioate
  modified_base 15: mod_base = OTHER; note = 2'-O-methylcytidine-3'-phosphorothioate
  modified_base 16: mod_base = OTHER; note = 2'-fluorouridine-3'-phosphorothioate
  modified_base 17: mod_base = OTHER; note = 2'-O-methylcytidine-3'-phosphorothioate
  modified_base 18: mod_base = OTHER; note = 2'-fluorocytidine-3'-phosphorothioate
  modified_base 19: mod_base = OTHER; note = 2'-fluorouridine-3'-phosphorothioate
  modified_base 20: mod_base = OTHER; note = 2'-O-methylguanosine-3'-phosphorothioate
  modified_base 21: mod_base = OTHER; note = 2'-O-methyladenosine-3'-phosphate
ttcagcattctgatctcctga

SEQ ID NO: 193 - RNA, 21 nt, synthetic construct
  source 1..21: mol_type = other RNA
  modified_base 1: mod_base = OTHER; note = 2'-O-methyluridine-3'-phosphorothioate
  modified_base 2: mod_base = OTHER; note = 2'-fluorouridine-3'-phosphorothioate
  modified_base 3: mod_base = OTHER; note = 2'-O-methylcytidine-3'-phosphate
  modified_base 4: mod_base = OTHER; note = 2'-fluorouridine-3'-phosphate
  modified_base 5: mod_base = OTHER; note = 2'-O-methyluridine-3'-phosphate
  modified_base 6: mod_base = OTHER; note = 2'-fluorocytidine-3'-phosphate
  modified_base 7: mod_base = OTHER; note = 2'-O-methyladenosine-3'-phosphate
  modified_base 8: mod_base = OTHER; note = 2'-fluoroguanosine-3'-phosphate
  modified_base 9: mod_base = OTHER; note = 2'-O-methylcytidine-3'-phosphate
  modified_base 10: mod_base = OTHER; note = 2'-fluoroadenosine-3'-phosphate
  modified_base 11: mod_base = OTHER; note = 2'-O-methyluridine-3'-phosphate
  modified_base 12: mod_base = OTHER; note = 2'-fluorouridine-3'-phosphate
  modified_base 13: mod_base = OTHER; note = 2'-O-methylcytidine-3'-phosphate
  modified_base 14: mod_base = OTHER; note = 2'-fluorouridine-3'-phosphorothioate
  modified_base 15: mod_base = OTHER; note = 2'-O-methylguanosine-3'-phosphorothioate
  modified_base 16: mod_base = OTHER; note = 2'-fluoroadenosine-3'-phosphorothioate
  modified_base 17: mod_base = OTHER; note = 2'-O-methyluridine-3'-phosphorothioate
  modified_base 18: mod_base = OTHER; note = 2'-fluorocytidine-3'-phosphorothioate
  modified_base 19: mod_base = OTHER; note = 2'-fluorouridine-3'-phosphorothioate
  modified_base 20: mod_base = OTHER; note = 2'-O-methylcytidine-3'-phosphorothioate
  modified_base 21: mod_base = OTHER; note = 2'-O-methylcytidine-3'-phosphate
ttcttcagcattctgatctcc

SEQ ID NO: 194 - RNA, 21 nt, synthetic construct
  source 1..21: mol_type = other RNA
  modified_base 1: mod_base = OTHER; note = 2'-O-methyluridine-3'-phosphorothioate
  modified_base 2: mod_base = OTHER; note = 2'-fluorouridine-3'-phosphorothioate
  modified_base 3: mod_base = OTHER; note = 2'-O-methylcytidine-3'-phosphate
  modified_base 4: mod_base = OTHER; note = 2'-fluorocytidine-3'-phosphate
  modified_base 5: mod_base = OTHER; note = 2'-O-methylguanosine-3'-phosphate
  modified_base 6: mod_base = OTHER; note = 2'-fluorouridine-3'-phosphate
  modified_base 7: mod_base = OTHER; note = 2'-O-methylguanosine-3'-phosphate
  modified_base 8: mod_base = OTHER; note = 2'-fluorouridine-3'-phosphate
  modified_base 9: mod_base = OTHER; note = 2'-O-methyluridine-3'-phosphate
  modified_base 10: mod_base = OTHER; note = 2'-fluoroguanosine-3'-phosphate
  modified_base 11: mod_base = OTHER; note = 2'-O-methyluridine-3'-phosphate
  modified_base 12: mod_base = OTHER; note = 2'-fluoroadenosine-3'-phosphate
  modified_base 13: mod_base = OTHER; note = 2'-O-methylcytidine-3'-phosphate
  modified_base 14: mod_base = OTHER; note = 2'-fluoroguanosine-3'-phosphorothioate
  modified_base 15: mod_base = OTHER; note = 2'-O-methyluridine-3'-phosphorothioate
  modified_base 16: mod_base = OTHER; note = 2'-fluoroguanosine-3'-phosphorothioate
  modified_base 17: mod_base = OTHER; note = 2'-O-methylcytidine-3'-phosphorothioate
  modified_base 18: mod_base = OTHER; note = 2'-fluoroadenosine-3'-phosphorothioate
  modified_base 19: mod_base = OTHER; note = 2'-fluoroguanosine-3'-phosphorothioate
  modified_base 20: mod_base = OTHER; note = 2'-O-methylguanosine-3'-phosphorothioate
  modified_base 21: mod_base = OTHER; note = 2'-O-methyladenosine-3'-phosphate
ttccgtgttgtacgtgcagga

SEQ ID NO: 195 - RNA, 21 nt, synthetic construct
  source 1..21: mol_type = other RNA
  modified_base 1: mod_base = OTHER; note = 2'-O-methyluridine-3'-phosphorothioate
  modified_base 2: mod_base = OTHER; note = 2'-fluorouridine-3'-phosphorothioate
  modified_base 3: mod_base = OTHER; note = 2'-O-methylcytidine-3'-phosphate
  modified_base 4: mod_base = OTHER; note = 2'-fluorouridine-3'-phosphate
  modified_base 5: mod_base = OTHER; note = 2'-O-methylguanosine-3'-phosphate
  modified_base 6: mod_base = OTHER; note = 2'-fluorouridine-3'-phosphate
  modified_base 7: mod_base = OTHER; note = 2'-O-methylguanosine-3'-phosphate
  modified_base 8: mod_base = OTHER; note = 2'-fluorouridine-3'-phosphate
  modified_base 9: mod_base = OTHER; note = 2'-O-methyluridine-3'-phosphate
  modified_base 10: mod_base = OTHER; note = 2'-fluoroguanosine-3'-phosphate
  modified_base 11: mod_base = OTHER; note = 2'-O-methyluridine-3'-phosphate
  modified_base 12: mod_base = OTHER; note = 2'-fluoroadenosine-3'-phosphate
  modified_base 13: mod_base = OTHER; note = 2'-O-methyluridine-3'-phosphate
  modified_base 14: mod_base = OTHER; note = 2'-fluoroguanosine-3'-phosphorothioate
  modified_base 15: mod_base = OTHER; note = 2'-O-methyluridine-3'-phosphorothioate
  modified_base 16: mod_base = OTHER; note = 2'-fluoroadenosine-3'-phosphorothioate
  modified_base 17: mod_base = OTHER; note = 2'-O-methylcytidine-3'-phosphorothioate
  modified_base 18: mod_base = OTHER; note = 2'-fluoroadenosine-3'-phosphorothioate
  modified_base 19: mod_base = OTHER; note = 2'-fluoroguanosine-3'-phosphorothioate
  modified_base 20: mod_base = OTHER; note = 2'-O-methylguanosine-3'-phosphorothioate
  modified_base 21: mod_base = OTHER; note = 2'-O-methyladenosine-3'-phosphate
ttctgtgttgtatgtacagga

SEQ ID NO: 196 - RNA, 21 nt, synthetic construct
  source 1..21: mol_type = other RNA
  modified_base 1: mod_base = OTHER; note = 2'-O-methyluridine-3'-phosphorothioate
  modified_base 2: mod_base = OTHER; note = 2'-fluorouridine-3'-phosphorothioate
  modified_base 3: mod_base = OTHER; note = 2'-O-methylcytidine-3'-phosphate
  modified_base 4: mod_base = OTHER; note = 2'-fluorocytidine-3'-phosphate
  modified_base 5: mod_base = OTHER; note = 2'-O-methylguanosine-3'-phosphate
  modified_base 6: mod_base = OTHER; note = 2'-fluorouridine-3'-phosphate
  modified_base 7: mod_base = OTHER; note = 2'-O-methylguanosine-3'-phosphate
  modified_base 8: mod_base = OTHER; note = 2'-fluorouridine-3'-phosphate
  modified_base 9: mod_base = OTHER; note = 2'-O-methyluridine-3'-phosphate
  modified_base 10: mod_base = OTHER; note = 2'-fluoroguanosine-3'-phosphate
  modified_base 11: mod_base = OTHER; note = 2'-O-methyluridine-3'-phosphate
  modified_base 12: mod_base = OTHER; note = 2'-fluoroadenosine-3'-phosphate
  modified_base 13: mod_base = OTHER; note = 2'-O-methylcytidine-3'-phosphate
  modified_base 14: mod_base = OTHER; note = 2'-fluoroguanosine-3'-phosphorothioate
  modified_base 15: mod_base = OTHER; note = 2'-O-methyluridine-3'-phosphorothioate
  modified_base 16: mod_base = OTHER; note = 2'-fluoroguanosine-3'-phosphorothioate
  modified_base 17: mod_base = OTHER; note = 2'-O-methylcytidine-3'-phosphorothioate
  modified_base 18: mod_base = OTHER; note = 2'-fluoroadenosine-3'-phosphorothioate
  modified_base 19: mod_base = OTHER; note = 2'-fluoroguanosine-3'-phosphorothioate
  modified_base 20: mod_base = OTHER; note = 2'-O-methylguanosine-3'-phosphorothioate
  modified_base 21: mod_base = OTHER; note = 2'-O-methyladenosine-3'-phosphate
ttccgtgttgtacgtgcagga

SEQ ID NO: 197 - RNA, 21 nt, synthetic construct
  source 1..21: mol_type = other RNA
  modified_base 1: mod_base = OTHER; note = 2'-O-methyluridine-3'-phosphorothioate
  modified_base 2: mod_base = OTHER; note = 2'-fluorouridine-3'-phosphorothioate
  modified_base 3: mod_base = OTHER; note = 2'-O-methylcytidine-3'-phosphate
  modified_base 4: mod_base = OTHER; note = 2'-fluorocytidine-3'-phosphate
  modified_base 5: mod_base = OTHER; note = 2'-O-methylguanosine-3'-phosphate
  modified_base 6: mod_base = OTHER; note = 2'-fluorouridine-3'-phosphate
  modified_base 7: mod_base = OTHER; note = 2'-O-methylguanosine-3'-phosphate
  modified_base 8: mod_base = OTHER; note = 2'-fluorouridine-3'-phosphate
  modified_base 9: mod_base = OTHER; note = 2'-O-methyluridine-3'-phosphate
  modified_base 10: mod_base = OTHER; note = 2'-fluoroguanosine-3'-phosphate
  modified_base 11: mod_base = OTHER; note = 2'-O-methyluridine-3'-phosphate
  modified_base 12: mod_base = OTHER; note = 2'-fluoroadenosine-3'-phosphate
  modified_base 13: mod_base = OTHER; note = 2'-O-methyluridine-3'-phosphate
  modified_base 14: mod_base = OTHER; note = 2'-fluoroguanosine-3'-phosphorothioate
  modified_base 15: mod_base = OTHER; note = 2'-O-methyluridine-3'-phosphorothioate
  modified_base 16: mod_base = OTHER; note = 2'-fluoroguanosine-3'-phosphorothioate
  modified_base 17: mod_base = OTHER; note = 2'-O-methylcytidine-3'-phosphorothioate
  modified_base 18: mod_base = OTHER; note = 2'-fluoroadenosine-3'-phosphorothioate
  modified_base 19: mod_base = OTHER; note = 2'-fluoroadenosine-3'-phosphorothioate
  modified_base 20: mod_base = OTHER; note = 2'-O-methylguanosine-3'-phosphorothioate
  modified_base 21: mod_base = OTHER; note = 2'-O-methyladenosine-3'-phosphate
ttccgtgttgtatgtgcaaga

SEQ ID NO: 198 - RNA, 21 nt, synthetic construct
  source 1..21: mol_type = other RNA
  modified_base 1: mod_base = OTHER; note = 2'-O-methyluridine-3'-phosphorothioate
  modified_base 2: mod_base = OTHER; note = 2'-fluorouridine-3'-phosphorothioate
  modified_base 3: mod_base = OTHER; note = 2'-O-methylcytidine-3'-phosphate
  modified_base 4: mod_base = OTHER; note = 2'-fluorouridine-3'-phosphate
  modified_base 5: mod_base = OTHER; note = 2'-O-methylguanosine-3'-phosphate
  modified_base 6: mod_base = OTHER; note = 2'-fluorouridine-3'-phosphate
  modified_base 7: mod_base = OTHER; note = 2'-O-methylguanosine-3'-phosphate
  modified_base 8: mod_base = OTHER; note = 2'-fluorouridine-3'-phosphate
  modified_base 9: mod_base = OTHER; note = 2'-O-methyluridine-3'-phosphate
  modified_base 10: mod_base = OTHER; note = 2'-fluoroguanosine-3'-phosphate
  modified_base 11: mod_base = OTHER; note = 2'-O-methyluridine-3'-phosphate
  modified_base 12: mod_base = OTHER; note = 2'-fluoroadenosine-3'-phosphate
  modified_base 13: mod_base = OTHER; note = 2'-O-methylcytidine-3'-phosphate
  modified_base 14: mod_base = OTHER; note = 2'-fluoroguanosine-3'-phosphorothioate
  modified_base 15: mod_base = OTHER; note = 2'-O-methyluridine-3'-phosphorothioate
  modified_base 16: mod_base = OTHER; note = 2'-fluoroadenosine-3'-phosphorothioate
  modified_base 17: mod_base = OTHER; note = 2'-O-methylcytidine-3'-phosphorothioate
  modified_base 18: mod_base = OTHER; note = 2'-fluoroadenosine-3'-phosphorothioate
  modified_base 19: mod_base = OTHER; note = 2'-fluoroguanosine-3'-phosphorothioate
  modified_base 20: mod_base = OTHER; note = 2'-O-methylguanosine-3'-phosphorothioate
  modified_base 21: mod_base = OTHER; note = 2'-O-methyladenosine-3'-phosphate
ttctgtgttgtacgtacagga

SEQ ID NO: 199 - RNA, 21 nt, synthetic construct
  source 1..21: mol_type = other RNA
  modified_base 1: mod_base = OTHER; note = 2'-O-methyluridine-3'-phosphorothioate
  modified_base 2: mod_base = OTHER; note = 2'-fluorouridine-3'-phosphorothioate
  modified_base 3: mod_base = OTHER; note = 2'-O-methylcytidine-3'-phosphate
  modified_base 4: mod_base = OTHER; note = 2'-fluorouridine-3'-phosphate
  modified_base 5: mod_base = OTHER; note = 2'-O-methylguanosine-3'-phosphate
  modified_base 6: mod_base = OTHER; note = 2'-fluorouridine-3'-phosphate
  modified_base 7: mod_base = OTHER; note = 2'-O-methylguanosine-3'-phosphate
  modified_base 8: mod_base = OTHER; note = 2'-fluorouridine-3'-phosphate
  modified_base 9: mod_base = OTHER; note = 2'-O-methyluridine-3'-phosphate
  modified_base 10: mod_base = OTHER; note = 2'-fluoroguanosine-3'-phosphate
  modified_base 11: mod_base = OTHER; note = 2'-O-methyluridine-3'-phosphate
  modified_base 12: mod_base = OTHER; note = 2'-fluoroadenosine-3'-phosphate
  modified_base 13: mod_base = OTHER; note = 2'-O-methyluridine-3'-phosphate
  modified_base 14: mod_base = OTHER; note = 2'-fluoroguanosine-3'-phosphorothioate
  modified_base 15: mod_base = OTHER; note = 2'-O-methyluridine-3'-phosphorothioate
  modified_base 16: mod_base = OTHER; note = 2'-fluoroguanosine-3'-phosphorothioate
  modified_base 17: mod_base = OTHER; note = 2'-O-methylcytidine-3'-phosphorothioate
  modified_base 18: mod_base = OTHER; note = 2'-fluoroadenosine-3'-phosphorothioate
  modified_base 19: mod_base = OTHER; note = 2'-fluorouridine-3'-phosphorothioate
  modified_base 20: mod_base = OTHER; note = 2'-O-methylguanosine-3'-phosphorothioate
  modified_base 21: mod_base = OTHER; note = 2'-O-methyladenosine-3'-phosphate
ttctgtgttgtatgtgcatga

SEQ ID NO: 200 - RNA, 21 nt, synthetic construct
  source 1..21: mol_type = other RNA
  modified_base 1: mod_base = OTHER; note = 2'-O-methyluridine-3'-phosphorothioate
  modified_base 2: mod_base = OTHER; note = 2'-fluorouridine-3'-phosphorothioate
  modified_base 3: mod_base = OTHER; note = 2'-O-methylcytidine-3'-phosphate
  modified_base 4: mod_base = OTHER; note = 2'-fluorouridine-3'-phosphate
  modified_base 5: mod_base = OTHER; note = 2'-O-methylguanosine-3'-phosphate
  modified_base 6: mod_base = OTHER; note = 2'-fluorouridine-3'-phosphate
  modified_base 7: mod_base = OTHER; note = 2'-O-methylguanosine-3'-phosphate
  modified_base 8: mod_base = OTHER; note = 2'-fluorouridine-3'-phosphate
  modified_base 9: mod_base = OTHER; note = 2'-O-methyluridine-3'-phosphate
  modified_base 10: mod_base = OTHER; note = 2'-fluoroguanosine-3'-phosphate
  modified_base 11: mod_base = OTHER; note = 2'-O-methyluridine-3'-phosphate
  modified_base 12: mod_base = OTHER; note = 2'-fluoroadenosine-3'-phosphate
  modified_base 13: mod_base = OTHER; note = 2'-O-methyluridine-3'-phosphate
  modified_base 14: mod_base = OTHER; note = 2'-fluoroguanosine-3'-phosphorothioate
  modified_base 15: mod_base = OTHER; note = 2'-O-methyluridine-3'-phosphorothioate
  modified_base 16: mod_base = OTHER; note = 2'-fluoroguanosine-3'-phosphorothioate
  modified_base 17: mod_base = OTHER; note = 2'-O-methylcytidine-3'-phosphorothioate
  modified_base 18: mod_base = OTHER; note = 2'-fluoroadenosine-3'-phosphorothioate
  modified_base 19: mod_base = OTHER; note = 2'-fluorocytidine-3'-phosphorothioate
  modified_base 20: mod_base = OTHER; note = 2'-O-methylguanosine-3'-phosphorothioate
  modified_base 21: mod_base = OTHER; note = 2'-O-methyladenosine-3'-phosphate
ttctgtgttgtatgtgcacga

SEQ ID NO: 201 - RNA, 21 nt, synthetic construct
  source 1..21: mol_type = other RNA
  modified_base 1: mod_base = OTHER; note = 2'-O-methyluridine-3'-phosphorothioate
  modified_base 2: mod_base = OTHER; note = 2'-fluorouridine-3'-phosphorothioate
  modified_base 3: mod_base = OTHER; note = 2'-O-methylcytidine-3'-phosphate
  modified_base 4: mod_base = OTHER; note = 2'-fluorocytidine-3'-phosphate
  modified_base 5: mod_base = OTHER; note = 2'-O-methyladenosine-3'-phosphate
  modified_base 6: mod_base = OTHER; note = 2'-fluorouridine-3'-phosphate
  modified_base 7: mod_base = OTHER; note = 2'-O-methyluridine-3'-phosphate
  modified_base 8: mod_base = OTHER; note = 2'-fluorocytidine-3'-phosphate
  modified_base 9: mod_base = OTHER; note = 2'-O-methyladenosine-3'-phosphate
  modified_base 10: mod_base = OTHER; note = 2'-fluorocytidine-3'-phosphate
  modified_base 11: mod_base = OTHER; note = 2'-O-methylcytidine-3'-phosphate
  modified_base 12: mod_base = OTHER; note = 2'-fluorocytidine-3'-phosphate
  modified_base 13: mod_base = OTHER; note = 2'-O-methylguanosine-3'-phosphate
  modified_base 14: mod_base = OTHER; note = 2'-fluoroguanosine-3'-phosphorothioate
  modified_base 15: mod_base = OTHER; note = 2'-O-methylguanosine-3'-phosphorothioate
  modified_base 16: mod_base = OTHER; note = 2'-fluoroadenosine-3'-phosphorothioate
  modified_base 17: mod_base = OTHER; note = 2'-O-methyladenosine-3'-phosphorothioate
  modified_base 18: mod_base = OTHER; note = 2'-fluoroguanosine-3'-phosphorothioate
  modified_base 19: mod_base = OTHER; note = 2'-fluorocytidine-3'-phosphorothioate
  modified_base 20: mod_base = OTHER; note = 2'-O-methylguanosine-3'-phosphorothioate
  modified_base 21: mod_base = OTHER; note = 2'-O-methylguanosine-3'-phosphate
ttccattcacccgggaagcgg

SEQ ID NO: 202 - RNA, 21 nt, synthetic construct
  source 1..21: mol_type = other RNA
  modified_base 1: mod_base = OTHER; note = 2'-O-methyluridine-3'-phosphorothioate
  modified_base 2: mod_base = OTHER; note = 2'-fluorouridine-3'-phosphorothioate
  modified_base 3: mod_base = OTHER; note = 2'-O-methylcytidine-3'-phosphate
  modified_base 4: mod_base = OTHER; note = 2'-fluorocytidine-3'-phosphate
  modified_base 5: mod_base = OTHER; note = 2'-O-methyladenosine-3'-phosphate
  modified_base 6: mod_base = OTHER; note = 2'-fluorouridine-3'-phosphate
  modified_base 7: mod_base = OTHER; note = 2'-O-methyluridine-3'-phosphate
  modified_base 8: mod_base = OTHER; note = 2'-fluorouridine-3'-phosphate
  modified_base 9: mod_base = OTHER; note = 2'-O-methyladenosine-3'-phosphate
  modified_base 10: mod_base = OTHER; note = 2'-fluorocytidine-3'-phosphate
  modified_base 11: mod_base = OTHER; note = 2'-O-methylcytidine-3'-phosphate
  modified_base 12: mod_base = OTHER; note = 2'-fluorocytidine-3'-phosphate
  modified_base 13: mod_base = OTHER; note = 2'-O-methylguanosine-3'-phosphate
  modified_base 14: mod_base = OTHER; note = 2'-fluoroguanosine-3'-phosphorothioate
  modified_base 15: mod_base = OTHER; note = 2'-O-methylguanosine-3'-phosphorothioate
  modified_base 16: mod_base = OTHER; note = 2'-fluoroadenosine-3'-phosphorothioate
  modified_base 17: mod_base = OTHER; note = 2'-O-methyladenosine-3'-phosphorothioate
  modified_base 18: mod_base = OTHER; note = 2'-fluoroguanosine-3'-phosphorothioate
  modified_base 19: mod_base = OTHER; note = 2'-fluorocytidine-3'-phosphorothioate
  modified_base 20: mod_base = OTHER; note = 2'-O-methylguanosine-3'-phosphorothioate
  modified_base 21: mod_base = OTHER; note = 2'-O-methylguanosine-3'-phosphate
ttccatttacccgggaagcgg

SEQ ID NO: 203 - RNA, 21 nt, synthetic construct
  source 1..21: mol_type = other RNA
  modified_base 1: mod_base = OTHER; note = 2'-O-methyluridine-3'-phosphorothioate
  modified_base 2: mod_base = OTHER; note = 2'-fluorouridine-3'-phosphorothioate
  modified_base 3: mod_base = OTHER; note = 2'-O-methylcytidine-3'-phosphate
  modified_base 4: mod_base = OTHER; note = 2'-fluorocytidine-3'-phosphate
  modified_base 5: mod_base = OTHER; note = 2'-O-methyladenosine-3'-phosphate
  modified_base 6: mod_base = OTHER; note = 2'-fluorouridine-3'-phosphate
  modified_base 7: mod_base = OTHER; note = 2'-O-methyluridine-3'-phosphate
  modified_base 8: mod_base = OTHER; note = 2'-fluorocytidine-3'-phosphate
  modified_base 9: mod_base = OTHER; note = 2'-O-methyladenosine-3'-phosphate
  modified_base 10: mod_base = OTHER; note = 2'-fluorocytidine-3'-phosphate
  modified_base 11: mod_base = OTHER; note = 2'-O-methylcytidine-3'-phosphate
  modified_base 12: mod_base = OTHER; note = 2'-fluorocytidine-3'-phosphate
  modified_base 13: mod_base = OTHER; note = 2'-O-methyluridine-3'-phosphate
  modified_base 14: mod_base = OTHER; note = 2'-fluoroguanosine-3'-phosphorothioate
  modified_base 15: mod_base = OTHER; note = 2'-O-methylguanosine-3'-phosphorothioate
  modified_base 16: mod_base = OTHER; note = 2'-fluoroadenosine-3'-phosphorothioate
  modified_base 17: mod_base = OTHER; note = 2'-O-methyladenosine-3'-phosphorothioate
  modified_base 18: mod_base = OTHER; note = 2'-fluorouridine-3'-phosphorothioate
  modified_base 19: mod_base = OTHER; note = 2'-fluorocytidine-3'-phosphorothioate
  modified_base 20: mod_base = OTHER; note = 2'-O-methylguanosine-3'-phosphorothioate
  modified_base 21: mod_base = OTHER; note = 2'-O-methylcytidine-3'-phosphate
ttccattcaccctggaatcgc

SEQ ID NO: 204 - RNA, 21 nt, synthetic construct
  source 1..21: mol_type = other RNA
  modified_base 1: mod_base = OTHER; note = 2'-O-methyluridine-3'-phosphorothioate
  modified_base 2: mod_base = OTHER; note = 2'-fluorouridine-3'-phosphorothioate
  modified_base 3: mod_base = OTHER; note = 2'-O-methylcytidine-3'-phosphate
  modified_base 4: mod_base = OTHER; note = 2'-fluorocytidine-3'-phosphate
  modified_base 5: mod_base = OTHER; note = 2'-O-methyladenosine-3'-phosphate
  modified_base 6: mod_base = OTHER; note = 2'-fluorocytidine-3'-phosphate
  modified_base 7: mod_base = OTHER; note = 2'-O-methyluridine-3'-phosphate
  modified_base 8: mod_base = OTHER; note = 2'-fluorocytidine-3'-phosphate
  modified_base 9: mod_base = OTHER; note = 2'-O-methylguanosine-3'-phosphate
  modified_base 10: mod_base = OTHER; note = 2'-fluorocytidine-3'-phosphate
  modified_base 11: mod_base = OTHER; note = 2'-O-methylcytidine-3'-phosphate
  modified_base 12: mod_base = OTHER; note = 2'-fluorocytidine-3'-phosphate
  modified_base 13: mod_base = OTHER; note = 2'-O-methyluridine-3'-phosphate
  modified_base 14: mod_base = OTHER; note = 2'-fluoroguanosine-3'-phosphorothioate
  modified_base 15: mod_base = OTHER; note = 2'-O-methylguanosine-3'-phosphorothioate
  modified_base 16: mod_base = OTHER; note = 2'-fluoroadenosine-3'-phosphorothioate
  modified_base 17: mod_base = OTHER; note = 2'-O-methyladenosine-3'-phosphorothioate
  modified_base 18: mod_base = OTHER; note = 2'-fluoroguanosine-3'-phosphorothioate
  modified_base 19: mod_base = OTHER; note = 2'-fluorocytidine-3'-phosphorothioate
  modified_base 20: mod_base = OTHER; note = 2'-O-methylguanosine-3'-phosphorothioate
  modified_base 21: mod_base = OTHER; note = 2'-O-methylguanosine-3'-phosphate
ttccactcgccctggaagcgg

SEQ ID NO: 205 - RNA, 21 nt, synthetic construct
  source 1..21: mol_type = other RNA
  modified_base 1: mod_base = OTHER; note = 2'-O-methyluridine-3'-phosphorothioate
  modified_base 2: mod_base = OTHER; note = 2'-fluorouridine-3'-phosphorothioate
  modified_base 3: mod_base = OTHER; note = 2'-O-methylcytidine-3'-phosphate
  modified_base 4: mod_base = OTHER; note = 2'-fluorocytidine-3'-phosphate
  modified_base 5: mod_base = OTHER; note = 2'-O-methyladenosine-3'-phosphate
  modified_base 6: mod_base = OTHER; note = 2'-fluorocytidine-3'-phosphate
  modified_base 7: mod_base = OTHER; note = 2'-O-methyluridine-3'-phosphate
  modified_base 8: mod_base = OTHER; note = 2'-fluorocytidine-3'-phosphate
  modified_base 9: mod_base = OTHER; note = 2'-O-methyladenosine-3'-phosphate
  modified_base 10: mod_base = OTHER; note = 2'-fluorocytidine-3'-phosphate
  modified_base 11: mod_base = OTHER; note = 2'-O-methylcytidine-3'-phosphate
  modified_base 12: mod_base = OTHER; note = 2'-fluorocytidine-3'-phosphate
  modified_base 13: mod_base = OTHER; note = 2'-O-methylguanosine-3'-phosphate
  modified_base 14: mod_base = OTHER; note = 2'-fluoroguanosine-3'-phosphorothioate
  modified_base 15: mod_base = OTHER; note = 2'-O-methylguanosine-3'-phosphorothioate
  modified_base 16: mod_base = OTHER; note = 2'-fluoroadenosine-3'-phosphorothioate
  modified_base 17: mod_base = OTHER; note = 2'-O-methyladenosine-3'-phosphorothioate
  modified_base 18: mod_base = OTHER; note = 2'-fluoroguanosine-3'-phosphorothioate
  modified_base 19: mod_base = OTHER; note = 2'-fluorocytidine-3'-phosphorothioate
  modified_base 20: mod_base = OTHER; note = 2'-O-methylguanosine-3'-phosphorothioate
  modified_base 21: mod_base = OTHER; note = 2'-O-methylguanosine-3'-phosphate
ttccactcacccgggaagcgg

SEQ ID NO: 206 - RNA, 21 nt, synthetic construct
  source 1..21: mol_type = other RNA
  modified_base 1: mod_base = OTHER; note = 2'-O-methyluridine-3'-phosphorothioate
  modified_base 2: mod_base = OTHER; note = 2'-fluorouridine-3'-phosphorothioate
  modified_base 3: mod_base = OTHER; note = 2'-O-methylcytidine-3'-phosphate
  modified_base 4: mod_base = OTHER; note = 2'-fluorocytidine-3'-phosphate
  modified_base 5: mod_base = OTHER; note = 2'-O-methyladenosine-3'-phosphate
  modified_base 6: mod_base = OTHER; note = 2'-fluorocytidine-3'-phosphate
  modified_base 7: mod_base = OTHER; note = 2'-O-methyluridine-3'-phosphate
  modified_base 8: mod_base = OTHER; note = 2'-fluorouridine-3'-phosphate
  modified_base 9: mod_base = OTHER; note = 2'-O-methyladenosine-3'-phosphate
  modified_base 10: mod_base = OTHER; note = 2'-fluorocytidine-3'-phosphate
  modified_base 11: mod_base = OTHER; note = 2'-O-methylcytidine-3'-phosphate
  modified_base 12: mod_base = OTHER; note = 2'-fluorocytidine-3'-phosphate
  modified_base 13: mod_base = OTHER; note = 2'-O-methylguanosine-3'-phosphate
  modified_base 14: mod_base = OTHER; note = 2'-fluoroguanosine-3'-phosphorothioate
  modified_base 15: mod_base = OTHER; note = 2'-O-methylguanosine-3'-phosphorothioate
  modified_base 16: mod_base = OTHER; note = 2'-fluoroadenosine-3'-phosphorothioate
  modified_base 17: mod_base = OTHER; note = 2'-O-methyladenosine-3'-phosphorothioate
  modified_base 18: mod_base = OTHER; note = 2'-fluoroguanosine-3'-phosphorothioate
  modified_base 19: mod_base = OTHER; note = 2'-fluorocytidine-3'-phosphorothioate
  modified_base 20: mod_base = OTHER; note = 2'-O-methylguanosine-3'-phosphorothioate
  modified_base 21: mod_base = OTHER; note = 2'-O-methylguanosine-3'-phosphate
ttccacttacccgggaagcgg

SEQ ID NO: 207 - RNA, 21 nt, synthetic construct
  source 1..21: mol_type = other RNA
  modified_base 1: mod_base = OTHER; note = 2'-O-methyluridine-3'-phosphorothioate
  modified_base 2: mod_base = OTHER; note = 2'-fluorouridine-3'-phosphorothioate
  modified_base 3: mod_base = OTHER; note = 2'-O-methylcytidine-3'-phosphate
  modified_base 4: mod_base = OTHER; note = 2'-fluoroadenosine-3'-phosphate
  modified_base 5: mod_base = OTHER; note = 2'-O-methylguanosine-3'-phosphate
  modified_base 6: mod_base = OTHER; note = 2'-fluorocytidine-3'-phosphate
  modified_base 7: mod_base = OTHER; note = 2'-O-methyladenosine-3'-phosphate
  modified_base 8: mod_base = OTHER; note = 2'-fluorouridine-3'-phosphate
  modified_base 9: mod_base = OTHER; note = 2'-O-methyluridine-3'-phosphate
  modified_base 10: mod_base = OTHER; note = 2'-fluorocytidine-3'-phosphate
  modified_base 11: mod_base = OTHER; note = 2'-O-methyluridine-3'-phosphate
  modified_base 12: mod_base = OTHER; note = 2'-fluoroguanosine-3'-phosphate
  modified_base 13: mod_base = OTHER; note = 2'-O-methyladenosine-3'-phosphate
  modified_base 14: mod_base = OTHER; note = 2'-fluorouridine-3'-phosphorothioate
  modified_base 15: mod_base = OTHER; note = 2'-O-methylcytidine-3'-phosphorothioate
  modified_base 16: mod_base = OTHER; note = 2'-fluorouridine-3'-phosphorothioate
  modified_base 17: mod_base = OTHER; note = 2'-O-methylcytidine-3'-phosphorothioate
  modified_base 18: mod_base = OTHER; note = 2'-fluorocytidine-3'-phosphorothioate
  modified_base 19: mod_base = OTHER; note = 2'-O-methyluridine-3'-phosphorothioate
  modified_base 20: mod_base = OTHER; note = 2'-fluoroguanosine-3'-phosphorothioate
  modified_base 21: mod_base = OTHER; note = 2'-O-methylguanosine-3'-phosphate
ttcagcattctgatctcctgg

SEQ ID NO: 208 - RNA, 21 nt, synthetic construct
  source 1..21: mol_type = other RNA
  modified_base 1: mod_base = OTHER; note = 2'-O-methyluridine-3'-phosphorothioate
  modified_base 2: mod_base = OTHER; note = 2'-fluorouridine-3'-phosphorothioate
  modified_base 3: mod_base = OTHER; note = 2'-O-methylcytidine-3'-phosphate
  modified_base 4: mod_base = OTHER; note = 2'-fluoroadenosine-3'-phosphate
  modified_base 5: mod_base = OTHER; note = 2'-O-methylguanosine-3'-phosphate
  modified_base 6: mod_base = OTHER; note = 2'-fluorocytidine-3'-phosphate
  modified_base 7: mod_base = OTHER; note = 2'-O-methyladenosine-3'-phosphate
  modified_base 8: mod_base = OTHER; note = 2'-fluorouridine-3'-phosphate
  modified_base 9: mod_base = OTHER; note = 2'-O-methyluridine-3'-phosphate
  modified_base 10: mod_base = OTHER; note = 2'-fluorocytidine-3'-phosphate
  modified_base 11: mod_base = OTHER; note = 2'-O-methyluridine-3'-phosphate
  modified_base 12: mod_base = OTHER; note = 2'-fluoroguanosine-3'-phosphate
  modified_base 13: mod_base = OTHER; note = 2'-O-methyladenosine-3'-phosphate
  modified_base 14: mod_base = OTHER; note = 2'-fluorouridine-3'-phosphorothioate
  modified_base 15: mod_base = OTHER; note = 2'-O-methylcytidine-3'-phosphorothioate
  modified_base 16: mod_base = OTHER; note = 2'-fluorouridine-3'-phosphorothioate
  modified_base 17: mod_base = OTHER; note = 2'-O-methylcytidine-3'-phosphorothioate
  modified_base 18: mod_base = OTHER; note = 2'-fluorocytidine-3'-phosphorothioate
  modified_base 19: mod_base = OTHER; note = 2'-O-methyluridine-3'-phosphorothioate
  modified_base 20: mod_base = OTHER; note = 2'-fluoroguanosine-3'-phosphorothioate
  modified_base 21: mod_base = OTHER; note = 2'-O-methyladenosine-3'-phosphate
ttcagcattctgatctcctga

SEQ ID NO: 209 - RNA, 21 nt, synthetic construct
  source 1..21: mol_type = other RNA
  modified_base 1: mod_base = OTHER; note = 2'-O-methyluridine-3'-phosphorothioate
  modified_base 2: mod_base = OTHER; note = 2'-fluorouridine-3'-phosphorothioate
  modified_base 3: mod_base = OTHER; note = 2'-O-methylcytidine-3'-phosphate
  modified_base 4: mod_base = OTHER; note = 2'-fluorouridine-3'-phosphate
  modified_base 5: mod_base = OTHER; note = 2'-O-methyluridine-3'-phosphate
  modified_base 6: mod_base = OTHER; note = 2'-fluorocytidine-3'-phosphate
  modified_base 7: mod_base = OTHER; note = 2'-O-methyladenosine-3'-phosphate
  modified_base 8: mod_base = OTHER; note = 2'-fluoroguanosine-3'-phosphate
  modified_base 9: mod_base = OTHER; note = 2'-O-methylcytidine-3'-phosphate
  modified_base 10: mod_base = OTHER; note = 2'-fluoroadenosine-3'-phosphate
  modified_base 11: mod_base = OTHER; note = 2'-O-methyluridine-3'-phosphate
  modified_base 12: mod_base = OTHER; note = 2'-fluorouridine-3'-phosphate
  modified_base 13: mod_base = OTHER; note = 2'-O-methylcytidine-3'-phosphate
  modified_base 14: mod_base = OTHER; note = 2'-fluorouridine-3'-phosphorothioate
  modified_base 15: mod_base = OTHER; note = 2'-O-methylguanosine-3'-phosphorothioate
  modified_base 16: mod_base = OTHER; note = 2'-fluoroadenosine-3'-phosphorothioate
  modified_base 17: mod_base = OTHER; note = 2'-O-methyluridine-3'-phosphorothioate
  modified_base 18: mod_base = OTHER; note = 2'-fluorocytidine-3'-phosphorothioate
  modified_base 19: mod_base = OTHER; note = 2'-O-methyluridine-3'-phosphorothioate
  modified_base 20: mod_base = OTHER; note = 2'-fluorocytidine-3'-phosphorothioate
  modified_base 21: mod_base = OTHER; note = 2'-O-methylcytidine-3'-phosphate
ttcttcagcattctgatctcc

SEQ ID NO: 210 - RNA, 21 nt, synthetic construct
  source 1..21: mol_type = other RNA
  modified_base 1: mod_base = OTHER; note = 2'-O-methyluridine-3'-phosphorothioate
  modified_base 2: mod_base = OTHER; note = 2'-fluorouridine-3'-phosphorothioate
  modified_base 3: mod_base = OTHER; note = 2'-O-methylcytidine-3'-phosphate
  modified_base 4: mod_base = OTHER; note = 2'-fluorocytidine-3'-phosphate
  modified_base 5: mod_base = OTHER; note = 2'-O-methylguanosine-3'-phosphate
  modified_base 6: mod_base = OTHER; note = 2'-fluorouridine-3'-phosphate
  modified_base 7: mod_base = OTHER; note = 2'-O-methylguanosine-3'-phosphate
  modified_base 8: mod_base = OTHER; note = 2'-fluorouridine-3'-phosphate
  modified_base 9: mod_base = OTHER; note = 2'-O-methyluridine-3'-phosphate
  modified_base 10: mod_base = OTHER; note = 2'-fluoroguanosine-3'-phosphate
  modified_base 11: mod_base = OTHER; note = 2'-O-methyluridine-3'-phosphate
  modified_base 12: mod_base = OTHER; note = 2'-fluoroadenosine-3'-phosphate
  modified_base 13: mod_base = OTHER; note = 2'-O-methylcytidine-3'-phosphate
  modified_base 14: mod_base = OTHER; note = 2'-fluoroguanosine-3'-phosphorothioate
  modified_base 15: mod_base = OTHER; note = 2'-O-methyluridine-3'-phosphorothioate
  modified_base 16: mod_base = OTHER; note = 2'-fluoroguanosine-3'-phosphorothioate
  modified_base 17: mod_base = OTHER; note = 2'-O-methylcytidine-3'-phosphorothioate
  modified_base 18: mod_base = OTHER; note = 2'-fluoroadenosine-3'-phosphorothioate
  modified_base 19: mod_base = OTHER; note = 2'-O-methylguanosine-3'-phosphorothioate
  modified_base 20: mod_base = OTHER; note = 2'-fluoroguanosine-3'-phosphorothioate
  modified_base 21: mod_base = OTHER; note = 2'-O-methyladenosine-3'-phosphate
ttccgtgttgtacgtgcagga

SEQ ID NO: 211 - RNA, 21 nt, synthetic construct
  source 1..21: mol_type = other RNA
  modified_base 1: mod_base = OTHER; note = 2'-O-methyluridine-3'-phosphorothioate
  modified_base 2: mod_base = OTHER; note = 2'-fluorouridine-3'-phosphorothioate
  modified_base 3: mod_base = OTHER; note = 2'-O-methylcytidine-3'-phosphate
  modified_base 4: mod_base = OTHER; note = 2'-fluorouridine-3'-phosphate
  modified_base 5: mod_base = OTHER; note = 2'-O-methylguanosine-3'-phosphate
  modified_base 6: mod_base = OTHER; note = 2'-fluorouridine-3'-phosphate
  modified_base 7: mod_base = OTHER; note = 2'-O-methylguanosine-3'-phosphate
  modified_base 8: mod_base = OTHER; note = 2'-fluorouridine-3'-phosphate
  modified_base 9: mod_base = OTHER; note = 2'-O-methyluridine-3'-phosphate
  modified_base 10: mod_base = OTHER; note = 2'-fluoroguanosine-3'-phosphate
  modified_base 11: mod_base = OTHER; note = 2'-O-methyluridine-3'-phosphate
  modified_base 12: mod_base = OTHER; note = 2'-fluoroadenosine-3'-phosphate
  modified_base 13: mod_base = OTHER; note = 2'-O-methyluridine-3'-phosphate
  modified_base 14: mod_base = OTHER; note = 2'-fluoroguanosine-3'-phosphorothioate
  modified_base 15: mod_base = OTHER; note = 2'-O-methyluridine-3'-phosphorothioate
  modified_base 16: mod_base = OTHER; note = 2'-fluoroadenosine-3'-phosphorothioate
  modified_base 17: mod_base = OTHER; note = 2'-O-methylcytidine-3'-phosphorothioate
  modified_base 18: mod_base = OTHER; note = 2'-fluoroadenosine-3'-phosphorothioate
  modified_base 19: mod_base = OTHER; note = 2'-O-methylguanosine-3'-phosphorothioate
  modified_base 20: mod_base = OTHER; note = 2'-fluoroguanosine-3'-phosphorothioate
  modified_base 21: mod_base = OTHER; note = 2'-O-methyladenosine-3'-phosphate
ttctgtgttgtatgtacagga

SEQ ID NO: 212 - RNA, 21 nt, synthetic construct
  source 1..21: mol_type = other RNA
  modified_base 1: mod_base = OTHER; note = 2'-O-methyluridine-3'-phosphorothioate
  modified_base 2: mod_base = OTHER; note = 2'-fluorouridine-3'-phosphorothioate
  modified_base 3: mod_base = OTHER; note = 2'-O-methylcytidine-3'-phosphate
  modified_base 4: mod_base = OTHER; note = 2'-fluorocytidine-3'-phosphate
  modified_base 5: mod_base = OTHER; note = 2'-O-methylguanosine-3'-phosphate
  modified_base 6: mod_base = OTHER; note = 2'-fluorouridine-3'-phosphate
  modified_base 7: mod_base = OTHER; note = 2'-O-methylguanosine-3'-phosphate
  modified_base 8: mod_base = OTHER; note = 2'-fluorouridine-3'-phosphate
  modified_base 9: mod_base = OTHER; note = 2'-O-methyluridine-3'-phosphate
  modified_base 10: mod_base = OTHER; note = 2'-fluoroguanosine-3'-phosphate
  modified_base 11: mod_base = OTHER; note = 2'-O-methyluridine-3'-phosphate
  modified_base 12: mod_base = OTHER; note = 2'-fluoroadenosine-3'-phosphate
  modified_base 13: mod_base = OTHER; note = 2'-O-methylcytidine-3'-phosphate
  modified_base 14: mod_base = OTHER; note = 2'-fluoroguanosine-3'-phosphorothioate
  modified_base 15: mod_base = OTHER; note = 2'-O-methyluridine-3'-phosphorothioate
  modified_base 16: mod_base = OTHER; note = 2'-fluoroguanosine-3'-phosphorothioate
  modified_base 17: mod_base = OTHER; note = 2'-O-methylcytidine-3'-phosphorothioate
  modified_base 18: mod_base = OTHER; note = 2'-fluoroadenosine-3'-phosphorothioate
  modified_base 19: mod_base = OTHER; note = 2'-O-methylguanosine-3'-phosphorothioate
  modified_base 20: mod_base = OTHER; note = 2'-fluoroguanosine-3'-phosphorothioate
  modified_base 21: mod_base = OTHER; note = 2'-O-methyladenosine-3'-phosphate
ttccgtgttgtacgtgcagga

SEQ ID NO: 213 - RNA, 21 nt, synthetic construct
  source 1..21: mol_type = other RNA
  modified_base 1: mod_base = OTHER; note = 2'-O-methyluridine-3'-phosphorothioate
  modified_base 2: mod_base = OTHER; note = 2'-fluorouridine-3'-phosphorothioate
  modified_base 3: mod_base = OTHER; note = 2'-O-methylcytidine-3'-phosphate
  modified_base 4: mod_base = OTHER; note = 2'-fluorocytidine-3'-phosphate
  modified_base 5: mod_base = OTHER; note = 2'-O-methylguanosine-3'-phosphate
  modified_base 6: mod_base = OTHER; note = 2'-fluorouridine-3'-phosphate
  modified_base 7: mod_base = OTHER; note = 2'-O-methylguanosine-3'-phosphate
  modified_base 8: mod_base = OTHER; note = 2'-fluorouridine-3'-phosphate
  modified_base 9: mod_base = OTHER; note = 2'-O-methyluridine-3'-phosphate
  modified_base 10: mod_base = OTHER; note = 2'-fluoroguanosine-3'-phosphate
  modified_base 11: mod_base = OTHER; note = 2'-O-methyluridine-3'-phosphate
  modified_base 12: mod_base = OTHER; note = 2'-fluoroadenosine-3'-phosphate
  modified_base 13: mod_base = OTHER; note = 2'-O-methyluridine-3'-phosphate
  modified_base 14: mod_base = OTHER; note = 2'-fluoroguanosine-3'-phosphorothioate
  modified_base 15: mod_base = OTHER; note = 2'-O-methyluridine-3'-phosphorothioate
  modified_base 16: mod_base = OTHER; note = 2'-fluoroguanosine-3'-phosphorothioate
  modified_base 17: mod_base = OTHER; note = 2'-O-methylcytidine-3'-phosphorothioate
  modified_base 18: mod_base = OTHER; note = 2'-fluoroadenosine-3'-phosphorothioate
  modified_base 19: mod_base = OTHER; note = 2'-O-methyladenosine-3'-phosphorothioate
  modified_base 20: mod_base = OTHER; note = 2'-fluoroguanosine-3'-phosphorothioate
  modified_base 21: mod_base = OTHER; note = 2'-O-methyladenosine-3'-phosphate
ttccgtgttgtatgtgcaaga

SEQ ID NO: 214 - RNA, 21 nt, synthetic construct
  source 1..21: mol_type = other RNA
  modified_base 1: mod_base = OTHER; note = 2'-O-methyluridine-3'-phosphorothioate
  modified_base 2: mod_base = OTHER; note = 2'-fluorouridine-3'-phosphorothioate
  modified_base 3: mod_base = OTHER; note = 2'-O-methylcytidine-3'-phosphate
  modified_base 4: mod_base = OTHER; note = 2'-fluorouridine-3'-phosphate
  modified_base 5: mod_base = OTHER; note = 2'-O-methylguanosine-3'-phosphate
  modified_base 6: mod_base = OTHER; note = 2'-fluorouridine-3'-phosphate
  modified_base 7: mod_base = OTHER; note = 2'-O-methylguanosine-3'-phosphate
  modified_base 8: mod_base = OTHER; note = 2'-fluorouridine-3'-phosphate
  modified_base 9: mod_base = OTHER; note = 2'-O-methyluridine-3'-phosphate
  modified_base 10: mod_base = OTHER; note = 2'-fluoroguanosine-3'-phosphate
  modified_base 11: mod_base = OTHER; note = 2'-O-methyluridine-3'-phosphate
  modified_base 12: mod_base = OTHER; note = 2'-fluoroadenosine-3'-phosphate
  modified_base 13: mod_base = OTHER; note = 2'-O-methylcytidine-3'-phosphate
  modified_base 14: mod_base = OTHER; note = 2'-fluoroguanosine-3'-phosphorothioate
  modified_base 15: mod_base = OTHER; note = 2'-O-methyluridine-3'-phosphorothioate
  modified_base 16: mod_base = OTHER; note = 2'-fluoroadenosine-3'-phosphorothioate
  modified_base 17: mod_base = OTHER; note = 2'-O-methylcytidine-3'-phosphorothioate
  modified_base 18: mod_base = OTHER; note = 2'-fluoroadenosine-3'-phosphorothioate
  modified_base 19: mod_base = OTHER; note = 2'-O-methylguanosine-3'-phosphorothioate
  modified_base 20: mod_base = OTHER; note = 2'-fluoroguanosine-3'-phosphorothioate
  modified_base 21: mod_base = OTHER; note = 2'-O-methyladenosine-3'-phosphate
ttctgtgttgtacgtacagga

SEQ ID NO: 215 - RNA, 21 nt, synthetic construct
  source 1..21: mol_type = other RNA
  modified_base 1: mod_base = OTHER; note = 2'-O-methyluridine-3'-phosphorothioate
  modified_base 2: mod_base = OTHER; note = 2'-fluorouridine-3'-phosphorothioate
  modified_base 3: mod_base = OTHER; note = 2'-O-methylcytidine-3'-phosphate
  modified_base 4: mod_base = OTHER; note = 2'-fluorouridine-3'-phosphate
  modified_base 5: mod_base = OTHER; note = 2'-O-methylguanosine-3'-phosphate
  modified_base 6: mod_base = OTHER; note = 2'-fluorouridine-3'-phosphate
  modified_base 7: mod_base = OTHER; note = 2'-O-methylguanosine-3'-phosphate
  modified_base 8: mod_base = OTHER; note = 2'-fluorouridine-3'-phosphate
  modified_base 9: mod_base = OTHER; note = 2'-O-methyluridine-3'-phosphate
  modified_base 10: mod_base = OTHER; note = 2'-fluoroguanosine-3'-phosphate
  modified_base 11: mod_base = OTHER; note = 2'-O-methyluridine-3'-phosphate
  modified_base 12: mod_base = OTHER; note = 2'-fluoroadenosine-3'-phosphate
  modified_base 13: mod_base = OTHER; note = 2'-O-methyluridine-3'-phosphate
  modified_base 14: mod_base = OTHER; note = 2'-fluoroguanosine-3'-phosphorothioate
  modified_base 15: mod_base = OTHER; note = 2'-O-methyluridine-3'-phosphorothioate
  modified_base 16: mod_base = OTHER; note = 2'-fluoroguanosine-3'-phosphorothioate
  modified_base 17: mod_base = OTHER; note = 2'-O-methylcytidine-3'-phosphorothioate
  modified_base 18: mod_base = OTHER; note = 2'-fluoroadenosine-3'-phosphorothioate
  modified_base 19: mod_base = OTHER; note = 2'-O-methyluridine-3'-phosphorothioate
  modified_base 20: mod_base = OTHER; note = 2'-fluoroguanosine-3'-phosphorothioate
  modified_base 21: mod_base = OTHER; note = 2'-O-methyladenosine-3'-phosphate
ttctgtgttgtatgtgcatga

SEQ ID NO: 216 - RNA, 21 nt, synthetic construct
  source 1..21: mol_type = other RNA
  modified_base 1: mod_base = OTHER; note = 2'-O-methyluridine-3'-phosphorothioate
  modified_base 2: mod_base = OTHER; note = 2'-fluorouridine-3'-phosphorothioate
  modified_base 3: mod_base = OTHER; note = 2'-O-methylcytidine-3'-phosphate
  modified_base 4: mod_base = OTHER; note = 2'-fluorouridine-3'-phosphate
  modified_base 5: mod_base = OTHER; note = 2'-O-methylguanosine-3'-phosphate
  modified_base 6: mod_base = OTHER; note = 2'-fluorouridine-3'-phosphate
  modified_base 7: mod_base = OTHER; note = 2'-O-methylguanosine-3'-phosphate
  modified_base 8: mod_base = OTHER; note = 2'-fluorouridine-3'-phosphate
  modified_base 9: mod_base = OTHER; note = 2'-O-methyluridine-3'-phosphate
  modified_base 10: mod_base = OTHER; note = 2'-fluoroguanosine-3'-phosphate
  modified_base 11: mod_base = OTHER; note = 2'-O-methyluridine-3'-phosphate
  modified_base 12: mod_base = OTHER; note = 2'-fluoroadenosine-3'-phosphate
  modified_base 13: mod_base = OTHER; note = 2'-O-methyluridine-3'-phosphate
  modified_base 14: mod_base = OTHER; note = 2'-fluoroguanosine-3'-phosphorothioate
  modified_base 15: mod_base = OTHER; note = 2'-O-methyluridine-3'-phosphorothioate
  modified_base 16: mod_base = OTHER; note = 2'-fluoroguanosine-3'-phosphorothioate
  modified_base 17: mod_base = OTHER; note = 2'-O-methylcytidine-3'-phosphorothioate
  modified_base 18: mod_base = OTHER; note = 2'-fluoroadenosine-3'-phosphorothioate
  modified_base 19: mod_base = OTHER; note = 2'-O-methylcytidine-3'-phosphorothioate
  modified_base 20: mod_base = OTHER; note = 2'-fluoroguanosine-3'-phosphorothioate
  modified_base 21: mod_base = OTHER; note = 2'-O-methyladenosine-3'-phosphate
ttctgtgttgtatgtgcacga

SEQ ID NO: 217 - RNA, 21 nt, synthetic construct
  source 1..21: mol_type = other RNA
  modified_base 1: mod_base = OTHER; note = 2'-O-methyluridine-3'-phosphorothioate
  modified_base 2: mod_base = OTHER; note = 2'-fluorouridine-3'-phosphorothioate
  modified_base 3: mod_base = OTHER; note = 2'-O-methylcytidine-3'-phosphate
  modified_base 4: mod_base = OTHER; note = 2'-fluorocytidine-3'-phosphate
  modified_base 5: mod_base = OTHER; note = 2'-O-methyladenosine-3'-phosphate
  modified_base 6: mod_base = OTHER; note = 2'-fluorouridine-3'-phosphate
  modified_base 7: mod_base = OTHER; note = 2'-O-methyluridine-3'-phosphate
  modified_base 8: mod_base = OTHER; note = 2'-fluorocytidine-3'-phosphate
  modified_base 9: mod_base = OTHER; note = 2'-O-methyladenosine-3'-phosphate
  modified_base 10: mod_base = OTHER; note = 2'-fluorocytidine-3'-phosphate
  modified_base 11: mod_base = OTHER; note = 2'-O-methylcytidine-3'-phosphate
  modified_base 12: mod_base = OTHER; note = 2'-fluorocytidine-3'-phosphate
  modified_base 13: mod_base = OTHER; note = 2'-O-methylguanosine-3'-phosphate
  modified_base 14: mod_base = OTHER; note = 2'-fluoroguanosine-3'-phosphorothioate
  modified_base 15: mod_base = OTHER; note = 2'-O-methylguanosine-3'-phosphorothioate
  modified_base 16: mod_base = OTHER; note = 2'-fluoroadenosine-3'-phosphorothioate
  modified_base 17: mod_base = OTHER; note = 2'-O-methyladenosine-3'-phosphorothioate
  modified_base 18: mod_base = OTHER; note = 2'-fluoroguanosine-3'-phosphorothioate
  modified_base 19: mod_base = OTHER; note = 2'-O-methylcytidine-3'-phosphorothioate
  modified_base 20: mod_base = OTHER; note = 2'-fluoroguanosine-3'-phosphorothioate
  modified_base 21: mod_base = OTHER; note = 2'-O-methylguanosine-3'-phosphate
ttccattcacccgggaagcgg

SEQ ID NO: 218 - RNA, 21 nt, synthetic construct
  source 1..21: mol_type = other RNA
  modified_base 1: mod_base = OTHER; note = 2'-O-methyluridine-3'-phosphorothioate
  modified_base 2: mod_base = OTHER; note = 2'-fluorouridine-3'-phosphorothioate
  modified_base 3: mod_base = OTHER; note = 2'-O-methylcytidine-3'-phosphate
  modified_base 4: mod_base = OTHER; note = 2'-fluorocytidine-3'-phosphate
  modified_base 5: mod_base = OTHER; note = 2'-O-methyladenosine-3'-phosphate
  modified_base 6: mod_base = OTHER; note = 2'-fluorouridine-3'-phosphate
  modified_base 7: mod_base = OTHER; note = 2'-O-methyluridine-3'-phosphate
  modified_base 8: mod_base = OTHER; note = 2'-fluorouridine-3'-phosphate
  modified_base 9: mod_base = OTHER; note = 2'-O-methyladenosine-3'-phosphate
  modified_base 10: mod_base = OTHER; note = 2'-fluorocytidine-3'-phosphate
  modified_base 11: mod_base = OTHER; note = 2'-O-methylcytidine-3'-phosphate
  modified_base 12: mod_base = OTHER; note = 2'-fluorocytidine-3'-phosphate
  modified_base 13: mod_base = OTHER; note = 2'-O-methylguanosine-3'-phosphate
  modified_base 14: mod_base = OTHER; note = 2'-fluoroguanosine-3'-phosphorothioate
  modified_base 15: mod_base = OTHER; note = 2'-O-methylguanosine-3'-phosphorothioate
  modified_base 16: mod_base = OTHER; note = 2'-fluoroadenosine-3'-phosphorothioate
  modified_base 17: mod_base = OTHER; note = 2'-O-methyladenosine-3'-phosphorothioate
  modified_base 18: mod_base = OTHER; note = 2'-fluoroguanosine-3'-phosphorothioate
  modified_base 19: mod_base = OTHER; note = 2'-O-methylcytidine-3'-phosphorothioate
  modified_base 20: mod_base = OTHER; note = 2'-fluoroguanosine-3'-phosphorothioate
  modified_base 21: mod_base = OTHER; note = 2'-O-methylguanosine-3'-phosphate
ttccatttacccgggaagcgg

SEQ ID NO: 219 - RNA, 21 nt, synthetic construct
  source 1..21: mol_type = other RNA
  modified_base 1: mod_base = OTHER; note = 2'-O-methyluridine-3'-phosphorothioate
  modified_base 2: mod_base = OTHER; note = 2'-fluorouridine-3'-phosphorothioate
  modified_base 3: mod_base = OTHER; note = 2'-O-methylcytidine-3'-phosphate
  modified_base 4: mod_base = OTHER; note = 2'-fluorocytidine-3'-phosphate
  modified_base 5: mod_base = OTHER; note = 2'-O-methyladenosine-3'-phosphate
  modified_base 6: mod_base = OTHER; note = 2'-fluorouridine-3'-phosphate
  modified_base 7: mod_base = OTHER; note = 2'-O-methyluridine-3'-phosphate
  modified_base 8: mod_base = OTHER; note = 2'-fluorocytidine-3'-phosphate
  modified_base 9: mod_base = OTHER; note = 2'-O-methyladenosine-3'-phosphate
  modified_base 10: mod_base = OTHER; note = 2'-fluorocytidine-3'-phosphate
  modified_base 11: mod_base = OTHER; note = 2'-O-methylcytidine-3'-phosphate
  modified_base 12: mod_base = OTHER; note = 2'-fluorocytidine-3'-phosphate
  modified_base 13: mod_base = OTHER; note = 2'-O-methyluridine-3'-phosphate
  modified_base 14: mod_base = OTHER; note = 2'-fluoroguanosine-3'-phosphorothioate
  modified_base 15: mod_base = OTHER; note = 2'-O-methylguanosine-3'-phosphorothioate
  modified_base 16: mod_base = OTHER; note = 2'-fluoroadenosine-3'-phosphorothioate
  modified_base 17: mod_base = OTHER; note = 2'-O-methyladenosine-3'-phosphorothioate
  modified_base 18: mod_base = OTHER; note = 2'-fluorouridine-3'-phosphorothioate
  modified_base 19: mod_base = OTHER; note = 2'-O-methylcytidine-3'-phosphorothioate
  modified_base 20: mod_base = OTHER; note = 2'-fluoroguanosine-3'-phosphorothioate
  modified_base 21: mod_base = OTHER; note = 2'-O-methylcytidine-3'-phosphate
ttccattcaccctggaatcgc

SEQ ID NO: 220 - RNA, 21 nt, synthetic construct
  source 1..21: mol_type = other RNA
  modified_base 1: mod_base = OTHER; note = 2'-O-methyluridine-3'-phosphorothioate
  modified_base 2: mod_base = OTHER; note = 2'-fluorouridine-3'-phosphorothioate
  modified_base 3: mod_base = OTHER; note = 2'-O-methylcytidine-3'-phosphate
  modified_base 4: mod_base = OTHER; note = 2'-fluorocytidine-3'-phosphate
  modified_base 5: mod_base = OTHER; note = 2'-O-methyladenosine-3'-phosphate
  modified_base 6: mod_base = OTHER; note = 2'-fluorocytidine-3'-phosphate
  modified_base 7: mod_base = OTHER; note = 2'-O-methyluridine-3'-phosphate
  modified_base 8: mod_base = OTHER; note = 2'-fluorocytidine-3'-phosphate
  modified_base 9: mod_base = OTHER; note = 2'-O-methylguanosine-3'-phosphate
  modified_base 10: mod_base = OTHER; note = 2'-fluorocytidine-3'-phosphate
  modified_base 11: mod_base = OTHER; note = 2'-O-methylcytidine-3'-phosphate
  modified_base 12: mod_base = OTHER; note = 2'-fluorocytidine-3'-phosphate
  modified_base 13: mod_base = OTHER; note = 2'-O-methyluridine-3'-phosphate
  modified_base 14: mod_base = OTHER; note = 2'-fluoroguanosine-3'-phosphorothioate
  modified_base 15: mod_base = OTHER; note = 2'-O-methylguanosine-3'-phosphorothioate
  modified_base 16: mod_base = OTHER; note = 2'-fluoroadenosine-3'-phosphorothioate
  modified_base 17: mod_base = OTHER; note = 2'-O-methyladenosine-3'-phosphorothioate
  modified_base 18: mod_base = OTHER; note = 2'-fluoroguanosine-3'-phosphorothioate
  modified_base 19: mod_base = OTHER; note = 2'-O-methylcytidine-3'-phosphorothioate
  modified_base 20: mod_base = OTHER; note = 2'-fluoroguanosine-3'-phosphorothioate
  modified_base 21: mod_base = OTHER; note = 2'-O-methylguanosine-3'-phosphate
ttccactcgccctggaagcgg

SEQ ID NO: 221 - RNA, 21 nt, synthetic construct
  source 1..21: mol_type = other RNA
  modified_base 1: mod_base = OTHER; note = 2'-O-methyluridine-3'-phosphorothioate
  modified_base 2: mod_base = OTHER; note = 2'-fluorouridine-3'-phosphorothioate
  modified_base 3: mod_base = OTHER; note = 2'-O-methylcytidine-3'-phosphate
  modified_base 4: mod_base = OTHER; note = 2'-fluorocytidine-3'-phosphate
  modified_base 5: mod_base = OTHER; note = 2'-O-methyladenosine-3'-phosphate
  modified_base 6: mod_base = OTHER; note = 2'-fluorocytidine-3'-phosphate
  modified_base 7: mod_base = OTHER; note = 2'-O-methyluridine-3'-phosphate
  modified_base 8: mod_base = OTHER; note = 2'-fluorocytidine-3'-phosphate
  modified_base 9: mod_base = OTHER; note = 2'-O-methyladenosine-3'-phosphate
  modified_base 10: mod_base = OTHER; note = 2'-fluorocytidine-3'-phosphate
  modified_base 11: mod_base = OTHER; note = 2'-O-methylcytidine-3'-phosphate
  modified_base 12: mod_base = OTHER; note = 2'-fluorocytidine-3'-phosphate
  modified_base 13: mod_base = OTHER; note = 2'-O-methylguanosine-3'-phosphate
  modified_base 14: mod_base = OTHER; note = 2'-fluoroguanosine-3'-phosphorothioate
  modified_base 15: mod_base = OTHER; note = 2'-O-methylguanosine-3'-phosphorothioate
  modified_base 16: mod_base = OTHER; note = 2'-fluoroadenosine-3'-phosphorothioate
  modified_base 17: mod_base = OTHER; note = 2'-O-methyladenosine-3'-phosphorothioate
  modified_base 18: mod_base = OTHER; note = 2'-fluoroguanosine-3'-phosphorothioate
  modified_base 19: mod_base = OTHER; note = 2'-O-methylcytidine-3'-phosphorothioate
  modified_base 20: mod_base = OTHER; note = 2'-fluoroguanosine-3'-phosphorothioate
  modified_base 21: mod_base = OTHER; note = 2'-O-methylguanosine-3'-phosphate
ttccactcacccgggaagcgg

SEQ ID NO: 222 - RNA, 21 nt, synthetic construct
  source 1..21: mol_type = other RNA
  modified_base 1: mod_base = OTHER; note = 2'-O-methyluridine-3'-phosphorothioate
  modified_base 2: mod_base = OTHER; note = 2'-fluorouridine-3'-phosphorothioate
  modified_base 3: mod_base = OTHER; note = 2'-O-methylcytidine-3'-phosphate
  modified_base 4: mod_base = OTHER; note = 2'-fluorocytidine-3'-phosphate
  modified_base 5: mod_base = OTHER; note = 2'-O-methyladenosine-3'-phosphate
  modified_base 6: mod_base = OTHER; note = 2'-fluoroguanosine-3'-phosphate
  modified_base 7: mod_base = OTHER; note = 2'-O-methyluridine-3'-phosphate
  modified_base 8: mod_base = OTHER; note = 2'-fluorouridine-3'-phosphate
  modified_base 9: mod_base = OTHER; note = 2'-O-methyladenosine-3'-phosphate
  modified_base 10: mod_base = OTHER; note = 2'-fluorocytidine-3'-phosphate
  modified_base 11: mod_base = OTHER; note = 2'-O-methylcytidine-3'-phosphate
  modified_base 12: mod_base = OTHER; note = 2'-fluorocytidine-3'-phosphate
  modified_base 13: mod_base = OTHER; note = 2'-O-methylguanosine-3'-phosphate
  modified_base 14: mod_base = OTHER; note = 2'-fluoroguanosine-3'-phosphorothioate
  modified_base 15: mod_base = OTHER; note = 2'-O-methylguanosine-3'-phosphorothioate
  modified_base 16: mod_base = OTHER; note = 2'-fluoroadenosine-3'-phosphorothioate
  modified_base 17: mod_base = OTHER; note = 2'-O-methyladenosine-3'-phosphorothioate
  modified_base 18: mod_base = OTHER; note = 2'-fluoroguanosine-3'-phosphorothioate
  modified_base 19: mod_base = OTHER; note = 2'-O-methylcytidine-3'-phosphorothioate
  modified_base 20: mod_base = OTHER; note = 2'-fluoroguanosine-3'-phosphorothioate
  modified_base 21: mod_base = OTHER; note = 2'-O-methylguanosine-3'-phosphate
ttccagttacccgggaagcgg

SEQ ID NO: 223 - RNA, 21 nt, Mus musculus
  source 1..21: mol_type = mRNA
ccaggagatcagaatgctgaa

SEQ ID NO: 224 - RNA, 21 nt, Rattus norvegicus
  source 1..21: mol_type = mRNA
tcaggagatcagaatgctgaa

SEQ ID NO: 225 - RNA, 21 nt, Mus musculus
  source 1..21: mol_type = mRNA
ggagatcagaatgctgaagaa

SEQ ID NO: 226 - RNA, 21 nt, Macaca mulatta
  source 1..21: mol_type = mRNA
tcctgcacgtacaacacggaa

SEQ ID NO: 227 - RNA, 21 nt, Canis lupus
  source 1..21: mol_type = mRNA; sub_species = familiaris
tcctgtacatacaacacagaa

SEQ ID NO: 228 - RNA, 21 nt, Equus caballus
  source 1..21: mol_type = mRNA
tcctgcacgtacaacacggaa

SEQ ID NO: 229 - RNA, 21 nt, Bos taurus
  source 1..21: mol_type = mRNA
tcttgcacatacaacacggaa

SEQ ID NO: 230 - RNA, 21 nt, Felis catus
  source 1..21: mol_type = mRNA
tcctgtacgtacaacacagaa

SEQ ID NO: 231 - RNA, 21 nt, Mus musculus
  source 1..21: mol_type = mRNA
tcatgcacatacaacacagaa

SEQ ID NO: 232 - RNA, 21 nt, Rattus norvegicus
  source 1..21: mol_type = mRNA
tcgtgcacatacaacacagaa

SEQ ID NO: 233 - RNA, 21 nt, Macaca mulatta
  source 1..21: mol_type = mRNA
ccgcttcccgggtgaatggaa

SEQ ID NO: 234 - RNA, 21 nt, Canis lupus
  source 1..21: mol_type = mRNA; sub_species = familiaris
ccgcttcccgggtaaatggga

SEQ ID NO: 235 - RNA, 21 nt, Equus caballus
  source 1..21: mol_type = mRNA
gcgattccagggtgaatggaa

SEQ ID NO: 236 - RNA, 21 nt, Bos taurus
  source 1..21: mol_type = mRNA
ccgcttccagggcgagtggaa

SEQ ID NO: 237 - RNA, 23 nt, synthetic construct
  source 1..23: mol_type = other RNA
  modified_base 1: mod_base = OTHER; note = 2'-fluorocytidine-3'-phosphate
  modified_base 2: mod_base = OTHER; note = 2'-O-methylcytidine-3'-phosphate
  modified_base 3: mod_base = OTHER; note = 2'-fluoroadenosine-3'-phosphate
  modified_base 4: mod_base = OTHER; note = 2'-O-methylguanosine-3'-phosphate
  modified_base 5: mod_base = OTHER; note = 2'-fluoroguanosine-3'-phosphate
  modified_base 6: mod_base = OTHER; note = 2'-O-methyladenosine-3'-phosphate
  modified_base 7: mod_base = OTHER; note = 2'-fluoroguanosine-3'-phosphate
  modified_base 8: mod_base = OTHER; note = 2'-O-methyladenosine-3'-phosphate
  modified_base 9: mod_base = OTHER; note = 2'-fluorouridine-3'-phosphate
  modified_base 10: mod_base = OTHER; note = 2'-O-methylcytidine-3'-phosphate
  modified_base 11: mod_base = OTHER; note = 2'-fluoroadenosine-3'-phosphate
  modified_base 12: mod_base = OTHER; note = 2'-O-methylguanosine-3'-phosphate
  modified_base 13: mod_base = OTHER; note = 2'-fluoroadenosine-3'-phosphate
  modified_base 14: mod_base = OTHER; note = 2'-O-methyladenosine-3'-phosphate
  modified_base 15: mod_base = OTHER; note = 2'-fluorouridine-3'-phosphate
  modified_base 16: mod_base = OTHER; note = 2'-O-methylguanosine-3'-phosphate
  modified_base 17: mod_base = OTHER; note = 2'-fluorocytidine-3'-phosphate
  modified_base 18: mod_base = OTHER; note = 2'-O-methyluridine-3'-phosphate
  modified_base 19: mod_base = OTHER; note = 2'-fluoroguanosine-3'-phosphate
  modified_base 20: mod_base = OTHER; note = 2'-O-methyladenosine-3'-phosphate
  modified_base 21: mod_base = OTHER; note = 2'-fluoroadenosine-3'-phosphorothioate
  modified_base 22: mod_base = OTHER; note = 2'-deoxythymidine-3'-phosphate
  modified_base 23: mod_base = OTHER; note = 2'-deoxythymidine-3'-phosphate
ccaggagatcagaatgctgaatt

SEQ ID NO: 238 - RNA, 23 nt, synthetic construct
  source 1..23: mol_type = other RNA
  modified_base 1: mod_base = OTHER; note = 2'-fluorouridine-3'-phosphate
  modified_base 2: mod_base = OTHER; note = 2'-O-methylcytidine-3'-phosphate
  modified_base 3: mod_base = OTHER; note = 2'-fluoroadenosine-3'-phosphate
  modified_base 4: mod_base = OTHER; note = 2'-O-methylguanosine-3'-phosphate
  modified_base 5: mod_base = OTHER; note = 2'-fluoroguanosine-3'-phosphate
  modified_base 6: mod_base = OTHER; note = 2'-O-methyladenosine-3'-phosphate
  modified_base 7: mod_base = OTHER; note = 2'-fluoroguanosine-3'-phosphate
  modified_base 8: mod_base = OTHER; note = 2'-O-methyladenosine-3'-phosphate
  modified_base 9: mod_base = OTHER; note = 2'-fluorouridine-3'-phosphate
  modified_base 10: mod_base = OTHER; note = 2'-O-methylcytidine-3'-phosphate
  modified_base 11: mod_base = OTHER; note = 2'-fluoroadenosine-3'-phosphate
  modified_base 12: mod_base = OTHER; note = 2'-O-methylguanosine-3'-phosphate
  modified_base 13: mod_base = OTHER; note = 2'-fluoroadenosine-3'-phosphate
  modified_base 14: mod_base = OTHER; note = 2'-O-methyladenosine-3'-phosphate
  modified_base 15: mod_base = OTHER; note = 2'-fluorouridine-3'-phosphate
  modified_base 16: mod_base = OTHER; note = 2'-O-methylguanosine-3'-phosphate
  modified_base 17: mod_base = OTHER; note = 2'-fluorocytidine-3'-phosphate
  modified_base 18: mod_base = OTHER; note = 2'-O-methyluridine-3'-phosphate
  modified_base 19: mod_base = OTHER; note = 2'-fluoroguanosine-3'-phosphate
  modified_base 20: mod_base = OTHER; note = 2'-O-methyladenosine-3'-phosphate
  modified_base 21: mod_base = OTHER; note = 2'-fluoroadenosine-3'-phosphorothioate
  modified_base 22: mod_base = OTHER; note = 2'-deoxythymidine-3'-phosphate
  modified_base 23: mod_base = OTHER; note = 2'-deoxythymidine-3'-phosphate
tcaggagatcagaatgctgaatt

SEQ ID NO: 239 - RNA, 23 nt, synthetic construct
  source 1..23: mol_type = other RNA
  modified_base 1: mod_base = OTHER; note = 2'-fluoroguanosine-3'-phosphate
  modified_base 2: mod_base = OTHER; note = 2'-O-methylguanosine-3'-phosphate
  modified_base 3: mod_base = OTHER; note = 2'-fluoroadenosine-3'-phosphate
  modified_base 4: mod_base = OTHER; note = 2'-O-methylguanosine-3'-phosphate
  modified_base 5: mod_base = OTHER; note = 2'-fluoroadenosine-3'-phosphate
  modified_base 6: mod_base = OTHER; note = 2'-O-methyluridine-3'-phosphate
  modified_base 7: mod_base = OTHER; note = 2'-fluorocytidine-3'-phosphate
  modified_base 8: mod_base = OTHER; note = 2'-O-methyladenosine-3'-phosphate
  modified_base 9: mod_base = OTHER; note = 2'-fluoroguanosine-3'-phosphate
  modified_base 10: mod_base = OTHER; note = 2'-O-methyladenosine-3'-phosphate
  modified_base 11: mod_base = OTHER; note = 2'-fluoroadenosine-3'-phosphate
  modified_base 12: mod_base = OTHER; note = 2'-O-methyluridine-3'-phosphate
  modified_base 13: mod_base = OTHER; note = 2'-fluoroguanosine-3'-phosphate
  modified_base 14: mod_base = OTHER; note = 2'-O-methylcytidine-3'-phosphate
  modified_base 15: mod_base = OTHER; note = 2'-fluorouridine-3'-phosphate
  modified_base 16: mod_base = OTHER; note = 2'-O-methylguanosine-3'-phosphate
  modified_base 17: mod_base = OTHER; note = 2'-fluoroadenosine-3'-phosphate
  modified_base 18: mod_base = OTHER; note = 2'-O-methyladenosine-3'-phosphate
  modified_base 19: mod_base = OTHER; note = 2'-fluoroguanosine-3'-phosphate
  modified_base 20: mod_base = OTHER; note = 2'-O-methyladenosine-3'-phosphate
  modified_base 21: mod_base = OTHER; note = 2'-fluoroadenosine-3'-phosphorothioate
  modified_base 22: mod_base = OTHER; note = 2'-deoxythymidine-3'-phosphate
  modified_base 23: mod_base = OTHER; note = 2'-deoxythymidine-3'-phosphate
ggagatcagaatgctgaagaatt

SEQ ID NO: 240 - RNA, 23 nt, synthetic construct
  source 1..23: mol_type = other RNA
  modified_base 1: mod_base = OTHER; note = 2'-fluorouridine-3'-phosphate
  modified_base 2: mod_base = OTHER; note = 2'-O-methylcytidine-3'-phosphate
  modified_base 3: mod_base = OTHER; note = 2'-fluoroadenosine-3'-phosphate
  modified_base 4: mod_base = OTHER; note = 2'-O-methyluridine-3'-phosphate
  modified_base 5: mod_base = OTHER; note = 2'-fluoroguanosine-3'-phosphate
  modified_base 6: mod_base = OTHER; note = 2'-O-methylcytidine-3'-phosphate
  modified_base 7: mod_base = OTHER; note = 2'-fluoroadenosine-3'-phosphate
  modified_base 8: mod_base = OTHER; note = 2'-O-methylcytidine-3'-phosphate
  modified_base 9: mod_base = OTHER; note = 2'-fluoroadenosine-3'-phosphate
  modified_base 10: mod_base = OTHER; note = 2'-O-methyluridine-3'-phosphate
  modified_base 11: mod_base = OTHER; note = 2'-fluoroadenosine-3'-phosphate
  modified_base 12: mod_base = OTHER; note = 2'-O-methylcytidine-3'-phosphate
  modified_base 13: mod_base = OTHER; note = 2'-fluoroadenosine-3'-phosphate
  modified_base 14: mod_base = OTHER; note = 2'-O-methyladenosine-3'-phosphate
  modified_base 15: mod_base = OTHER; note = 2'-fluorocytidine-3'-phosphate
  modified_base 16: mod_base = OTHER; note = 2'-O-methyladenosine-3'-phosphate
  modified_base 17: mod_base = OTHER; note = 2'-fluorocytidine-3'-phosphate
  modified_base 18: mod_base = OTHER; note = 2'-O-methyladenosine-3'-phosphate
  modified_base 19: mod_base = OTHER; note = 2'-fluoroguanosine-3'-phosphate
  modified_base 20: mod_base = OTHER; note = 2'-O-methyladenosine-3'-phosphate
  modified_base 21: mod_base = OTHER; note = 2'-fluoroadenosine-3'-phosphorothioate
  modified_base 22: mod_base = OTHER; note = 2'-deoxythymidine-3'-phosphate
  modified_base 23: mod_base = OTHER; note = 2'-deoxythymidine-3'-phosphate
tcatgcacatacaacacagaatt

SEQ ID NO: 241 - RNA, 23 nt, synthetic construct
  source 1..23: mol_type = other RNA
  modified_base 1: mod_base = OTHER; note = 2'-fluorouridine-3'-phosphate
  modified_base 2: mod_base = OTHER; note = 2'-O-methylcytidine-3'-phosphate
  modified_base 3: mod_base = OTHER; note = 2'-fluoroguanosine-3'-phosphate
  modified_base 4: mod_base = OTHER; note = 2'-O-methyluridine-3'-phosphate
  modified_base 5: mod_base = OTHER; note = 2'-fluoroguanosine-3'-phosphate
  modified_base 6: mod_base = OTHER; note = 2'-O-methylcytidine-3'-phosphate
  modified_base 7: mod_base = OTHER; note = 2'-fluoroadenosine-3'-phosphate
  modified_base 8: mod_base = OTHER; note = 2'-O-methylcytidine-3'-phosphate
  modified_base 9: mod_base = OTHER; note = 2'-fluoroadenosine-3'-phosphate
  modified_base 10: mod_base = OTHER; note = 2'-O-methyluridine-3'-phosphate
  modified_base 11: mod_base = OTHER; note = 2'-fluoroadenosine-3'-phosphate
  modified_base 12: mod_base = OTHER; note = 2'-O-methylcytidine-3'-phosphate
  modified_base 13: mod_base = OTHER; note = 2'-fluoroadenosine-3'-phosphate
  modified_base 14: mod_base = OTHER; note = 2'-O-methyladenosine-3'-phosphate
  modified_base 15: mod_base = OTHER; note = 2'-fluorocytidine-3'-phosphate
  modified_base 16: mod_base = OTHER; note = 2'-O-methyladenosine-3'-phosphate
  modified_base 17: mod_base = OTHER; note = 2'-fluorocytidine-3'-phosphate
  modified_base 18: mod_base = OTHER; note = 2'-O-methyladenosine-3'-phosphate
  modified_base 19: mod_base = OTHER; note = 2'-fluoroguanosine-3'-phosphate
  modified_base 20: mod_base = OTHER; note = 2'-O-methyladenosine-3'-phosphate
  modified_base 21: mod_base = OTHER; note = 2'-fluoroadenosine-3'-phosphorothioate
  modified_base 22: mod_base = OTHER; note = 2'-deoxythymidine-3'-phosphate
  modified_base 23: mod_base = OTHER; note = 2'-deoxythymidine-3'-phosphate
tcgtgcacatacaacacagaatt

SEQ ID NO: 242 - RNA, 23 nt, synthetic construct
  source 1..23: mol_type = other RNA
  modified_base 1: mod_base = OTHER; note = 2'-fluorouridine-3'-phosphate
  modified_base 2: mod_base = OTHER; note = 2'-O-methylcytidine-3'-phosphate
  modified_base 3: mod_base = OTHER; note = 2'-fluorocytidine-3'-phosphate
  modified_base 4: mod_base = OTHER; note = 2'-O-methyluridine-3'-phosphate
  modified_base 5: mod_base = OTHER; note = 2'-fluoroguanosine-3'-phosphate
  modified_base 6: mod_base = OTHER; note = 2'-O-methyluridine-3'-phosphate
  modified_base 7: mod_base = OTHER; note = 2'-fluoroadenosine-3'-phosphate
  modified_base 8: mod_base = OTHER; note = 2'-O-methylcytidine-3'-phosphate
  modified_base 9: mod_base = OTHER; note = 2'-fluoroadenosine-3'-phosphate
  modified_base 10: mod_base = OTHER; note = 2'-O-methyluridine-3'-phosphate
  modified_base 11: mod_base = OTHER; note = 2'-fluoroadenosine-3'-phosphate
  modified_base 12: mod_base = OTHER; note = 2'-O-methylcytidine-3'-phosphate
  modified_base 13: mod_base = OTHER; note = 2'-fluoroadenosine-3'-phosphate
  modified_base 14: mod_base = OTHER; note = 2'-O-methyladenosine-3'-phosphate
  modified_base 15: mod_base = OTHER; note = 2'-fluorocytidine-3'-phosphate
  modified_base 16: mod_base = OTHER; note = 2'-O-methyladenosine-3'-phosphate
  modified_base 17: mod_base = OTHER; note = 2'-fluorocytidine-3'-phosphate
  modified_base 18: mod_base = OTHER; note = 2'-O-methyladenosine-3'-phosphate
  modified_base 19: mod_base = OTHER; note = 2'-fluoroguanosine-3'-phosphate
  modified_base 20: mod_base = OTHER; note = 2'-O-methyladenosine-3'-phosphate
  modified_base 21: mod_base = OTHER; note = 2'-fluoroadenosine-3'-phosphorothioate
  modified_base 22: mod_base = OTHER; note = 2'-deoxythymidine-3'-phosphate
  modified_base 23: mod_base = OTHER; note = 2'-deoxythymidine-3'-phosphate
tcctgtacatacaacacagaatt

SEQ ID NO: 243 - RNA, 23 nt, synthetic construct
  source 1..23: mol_type = other RNA
  modified_base 1: mod_base = OTHER; note = 2'-fluorouridine-3'-phosphate
  modified_base 2: mod_base = OTHER; note = 2'-O-methylcytidine-3'-phosphate
  modified_base 3: mod_base = OTHER; note = 2'-fluorocytidine-3'-phosphate
  modified_base 4: mod_base = OTHER; note = 2'-O-methyluridine-3'-phosphate
  modified_base 5: mod_base = OTHER; note = 2'-fluoroguanosine-3'-phosphate
  modified_base 6: mod_base = OTHER; note = 2'-O-methylcytidine-3'-phosphate
  modified_base 7: mod_base = OTHER; note = 2'-fluoroadenosine-3'-phosphate
  modified_base 8: mod_base = OTHER; note = 2'-O-methylcytidine-3'-phosphate
  modified_base 9: mod_base = OTHER; note = 2'-fluoroguanosine-3'-phosphate
  modified_base 10: mod_base = OTHER; note = 2'-O-methyluridine-3'-phosphate
  modified_base 11: mod_base = OTHER; note = 2'-fluoroadenosine-3'-phosphate
  modified_base 12: mod_base = OTHER; note = 2'-O-methylcytidine-3'-phosphate
  modified_base 13: mod_base = OTHER; note = 2'-fluoroadenosine-3'-phosphate
  modified_base 14: mod_base = OTHER; note = 2'-O-methyladenosine-3'-phosphate
  modified_base 15: mod_base = OTHER; note = 2'-fluorocytidine-3'-phosphate
  modified_base 16: mod_base = OTHER; note = 2'-O-methyladenosine-3'-phosphate
  modified_base 17: mod_base = OTHER; note = 2'-fluorocytidine-3'-phosphate
  modified_base 18: mod_base = OTHER; note = 2'-O-methylguanosine-3'-phosphate
  modified_base 19: mod_base = OTHER; note = 2'-fluoroguanosine-3'-phosphate
  modified_base 20: mod_base = OTHER; note = 2'-O-methyladenosine-3'-phosphate
  modified_base 21: mod_base = OTHER; note = 2'-fluoroadenosine-3'-phosphorothioate
  modified_base 22: mod_base = OTHER; note = 2'-deoxythymidine-3'-phosphate
  modified_base 23: mod_base = OTHER; note = 2'-deoxythymidine-3'-phosphate
tcctgcacgtacaacacggaatt

SEQ ID NO: 244 - RNA, 23 nt, synthetic construct
  source 1..23: mol_type = other RNA
  modified_base 1: mod_base = OTHER; note = 2'-fluorouridine-3'-phosphate
  modified_base 2: mod_base = OTHER; note = 2'-O-methylcytidine-3'-phosphate
  modified_base 3: mod_base = OTHER; note = 2'-fluorocytidine-3'-phosphate
  modified_base 4: mod_base = OTHER; note = 2'-O-methyluridine-3'-phosphate
  modified_base 5: mod_base = OTHER; note = 2'-fluoroguanosine-3'-phosphate
  modified_base 6: mod_base = OTHER; note = 2'-O-methyluridine-3'-phosphate
  modified_base 7: mod_base = OTHER; note = 2'-fluoroadenosine-3'-phosphate
  modified_base 8: mod_base = OTHER; note = 2'-O-methylcytidine-3'-phosphate
  modified_base 9: mod_base = OTHER; note = 2'-fluoroguanosine-3'-phosphate
  modified_base 10: mod_base = OTHER; note = 2'-O-methyluridine-3'-phosphate
  modified_base 11: mod_base = OTHER; note = 2'-fluoroadenosine-3'-phosphate
  modified_base 12: mod_base = OTHER; note = 2'-O-methylcytidine-3'-phosphate
  modified_base 13: mod_base = OTHER; note = 2'-fluoroadenosine-3'-phosphate
  modified_base 14: mod_base = OTHER; note = 2'-O-methyladenosine-3'-phosphate
  modified_base 15: mod_base = OTHER; note = 2'-fluorocytidine-3'-phosphate
  modified_base 16: mod_base = OTHER; note = 2'-O-methyladenosine-3'-phosphate
  modified_base 17: mod_base = OTHER; note = 2'-fluorocytidine-3'-phosphate
  modified_base 18: mod_base = OTHER; note = 2'-O-methyladenosine-3'-phosphate
  modified_base 19: mod_base = OTHER; note = 2'-fluoroguanosine-3'-phosphate
  modified_base 20: mod_base = OTHER; note = 2'-O-methyladenosine-3'-phosphate
  modified_base 21: mod_base = OTHER; note = 2'-fluoroadenosine-3'-phosphorothioate
  modified_base 22: mod_base = OTHER; note = 2'-deoxythymidine-3'-phosphate
  modified_base 23: mod_base = OTHER; note = 2'-deoxythymidine-3'-phosphate
tcctgtacgtacaacacagaatt

SEQ ID NO: 245 - RNA, 23 nt, synthetic construct
  source 1..23: mol_type = other RNA
  modified_base 1: mod_base = OTHER; note = 2'-fluorouridine-3'-phosphate
  modified_base 2: mod_base = OTHER; note = 2'-O-methylcytidine-3'-phosphate
  modified_base 3: mod_base = OTHER; note = 2'-fluorouridine-3'-phosphate
  modified_base 4: mod_base = OTHER; note = 2'-O-methyluridine-3'-phosphate
  modified_base 5: mod_base = OTHER; note = 2'-fluoroguanosine-3'-phosphate
  modified_base 6: mod_base = OTHER; note = 2'-O-methylcytidine-3'-phosphate
  modified_base 7: mod_base = OTHER; note = 2'-fluoroadenosine-3'-phosphate
  modified_base 8: mod_base = OTHER; note = 2'-O-methylcytidine-3'-phosphate
  modified_base 9: mod_base = OTHER; note = 2'-fluoroadenosine-3'-phosphate
  modified_base 10: mod_base = OTHER; note = 2'-O-methyluridine-3'-phosphate
  modified_base 11: mod_base = OTHER; note = 2'-fluoroadenosine-3'-phosphate
  modified_base 12: mod_base = OTHER; note = 2'-O-methylcytidine-3'-phosphate
  modified_base 13: mod_base = OTHER; note = 2'-fluoroadenosine-3'-phosphate
  modified_base 14: mod_base = OTHER; note = 2'-O-methyladenosine-3'-phosphate
  modified_base 15: mod_base = OTHER; note = 2'-fluorocytidine-3'-phosphate
  modified_base 16: mod_base = OTHER; note = 2'-O-methyladenosine-3'-phosphate
  modified_base 17: mod_base = OTHER; note = 2'-fluorocytidine-3'-phosphate
  modified_base 18: mod_base = OTHER; note = 2'-O-methylguanosine-3'-phosphate
  modified_base 19: mod_base = OTHER; note = 2'-fluoroguanosine-3'-phosphate
  modified_base 20: mod_base = OTHER; note = 2'-O-methyladenosine-3'-phosphate
  modified_base 21: mod_base = OTHER; note = 2'-fluoroadenosine-3'-phosphorothioate
  modified_base 22: mod_base = OTHER; note = 2'-deoxythymidine-3'-phosphate
  modified_base 23: mod_base = OTHER; note = 2'-deoxythymidine-3'-phosphate
tcttgcacatacaacacggaatt

SEQ ID NO: 246 - RNA, 23 nt, synthetic construct
  source 1..23: mol_type = other RNA
  modified_base 1: mod_base = OTHER; note = 2'-fluorocytidine-3'-phosphate
  modified_base 2: mod_base = OTHER; note = 2'-O-methylcytidine-3'-phosphate
  modified_base 3: mod_base = OTHER; note = 2'-fluoroguanosine-3'-phosphate
  modified_base 4: mod_base = OTHER; note = 2'-O-methylcytidine-3'-phosphate
  modified_base 5: mod_base = OTHER; note = 2'-fluorouridine-3'-phosphate
  modified_base 6: mod_base = OTHER; note = 2'-O-methyluridine-3'-phosphate
  modified_base 7: mod_base = OTHER; note = 2'-fluorocytidine-3'-phosphate
  modified_base 8: mod_base = OTHER; note = 2'-O-methylcytidine-3'-phosphate
  modified_base 9: mod_base = OTHER; note = 2'-fluorocytidine-3'-phosphate
  modified_base 10: mod_base = OTHER; note = 2'-O-methylguanosine-3'-phosphate
  modified_base 11: mod_base = OTHER; note = 2'-fluoroguanosine-3'-phosphate
  modified_base 12: mod_base = OTHER; note = 2'-O-methylguanosine-3'-phosphate
  modified_base 13: mod_base = OTHER; note = 2'-fluorouridine-3'-phosphate
  modified_base 14: mod_base = OTHER; note = 2'-O-methylguanosine-3'-phosphate
  modified_base 15: mod_base = OTHER; note = 2'-fluoroadenosine-3'-phosphate
  modified_base 16: mod_base = OTHER; note = 2'-O-methylguanosine-3'-phosphate
  modified_base 17: mod_base = OTHER; note = 2'-fluorouridine-3'-phosphate
  modified_base 18: mod_base = OTHER; note = 2'-O-methylguanosine-3'-phosphate
  modified_base 19: mod_base = OTHER; note = 2'-fluoroguanosine-3'-phosphate
  modified_base 20: mod_base = OTHER; note = 2'-O-methyladenosine-3'-phosphate
  modified_base 21: mod_base = OTHER; note = 2'-fluoroadenosine-3'-phosphorothioate
  modified_base 22: mod_base = OTHER; note = 2'-deoxythymidine-3'-phosphate
  modified_base 23: mod_base = OTHER; note = 2'-deoxythymidine-3'-phosphate
ccgcttcccgggtgagtggaatt

SEQ ID NO: 247 - RNA, 23 nt, synthetic construct
  source 1..23: mol_type = other RNA
  modified_base 1: mod_base = OTHER; note = 2'-fluorocytidine-3'-phosphate
  modified_base 2: mod_base = OTHER; note = 2'-O-methylcytidine-3'-phosphate
  modified_base 3: mod_base = OTHER; note = 2'-fluoroguanosine-3'-phosphate
  modified_base 4: mod_base = OTHER; note = 2'-O-methylcytidine-3'-phosphate
  modified_base 5: mod_base = OTHER; note = 2'-fluorouridine-3'-phosphate
  modified_base 6: mod_base = OTHER; note = 2'-O-methyluridine-3'-phosphate
  modified_base 7: mod_base = OTHER; note = 2'-fluorocytidine-3'-phosphate
  modified_base 8: mod_base = OTHER; note = 2'-O-methylcytidine-3'-phosphate
  modified_base 9: mod_base = OTHER; note = 2'-fluorocytidine-3'-phosphate
  modified_base 10: mod_base = OTHER; note = 2'-O-methylguanosine-3'-phosphate
  modified_base 11: mod_base = OTHER; note = 2'-fluoroguanosine-3'-phosphate
  modified_base 12: mod_base = OTHER; note = 2'-O-methylguanosine-3'-phosphate
  modified_base 13: mod_base = OTHER; note = 2'-fluorouridine-3'-phosphate
  modified_base 14: mod_base = OTHER; note = 2'-O-methyladenosine-3'-phosphate
  modified_base 15: mod_base = OTHER; note = 2'-fluoroadenosine-3'-phosphate
  modified_base 16: mod_base = OTHER; note = 2'-O-methylcytidine-3'-phosphate
  modified_base 17: mod_base = OTHER; note = 2'-fluorouridine-3'-phosphate
  modified_base 18: mod_base = OTHER; note = 2'-O-methylguanosine-3'-phosphate
  modified_base 19: mod_base = OTHER; note = 2'-fluoroguanosine-3'-phosphate
  modified_base 20: mod_base = OTHER; note = 2'-O-methyladenosine-3'-phosphate
  modified_base 21: mod_base = OTHER; note = 2'-fluoroadenosine-3'-phosphorothioate
  modified_base 22: mod_base = OTHER; note = 2'-deoxythymidine-3'-phosphate
  modified_base 23: mod_base = OTHER; note = 2'-deoxythymidine-3'-phosphate
ccgcttcccgggtaactggaatt

SEQ ID NO: 248 - RNA, 23 nt, synthetic construct
  source 1..23: mol_type = other RNA
  modified_base 1: mod_base = OTHER; note = 2'-fluorocytidine-3'-phosphate
  modified_base 2: mod_base = OTHER; note = 2'-O-methylcytidine-3'-phosphate
  modified_base 3: mod_base = OTHER; note = 2'-fluoroguanosine-3'-phosphate
  modified_base 4: mod_base = OTHER; note = 2'-O-methylcytidine-3'-phosphate
  modified_base 5: mod_base = OTHER; note = 2'-fluorouridine-3'-phosphate
  modified_base 6: mod_base = OTHER; note = 2'-O-methyluridine-3'-phosphate
  modified_base 7: mod_base = OTHER; note = 2'-fluorocytidine-3'-phosphate
  modified_base 8: mod_base = OTHER; note = 2'-O-methylcytidine-3'-phosphate
  modified_base 9: mod_base = OTHER; note = 2'-fluorocytidine-3'-phosphate
  modified_base 10: mod_base = OTHER; note = 2'-O-methylguanosine-3'-phosphate
  modified_base 11: mod_base = OTHER; note = 2'-fluoroguanosine-3'-phosphate
  modified_base 12: mod_base = OTHER; note = 2'-O-methylguanosine-3'-phosphate
  modified_base 13: mod_base = OTHER; note = 2'-fluorouridine-3'-phosphate
  modified_base 14: mod_base = OTHER; note = 2'-O-methyladenosine-3'-phosphate
  modified_base 15: mod_base = OTHER; note = 2'-fluoroadenosine-3'-phosphate
  modified_base 16: mod_base = OTHER; note = 2'-O-methyladenosine-3'-phosphate
  modified_base 17: mod_base = OTHER; note = 2'-fluorouridine-3'-phosphate
  modified_base 18: mod_base = OTHER; note = 2'-O-methylguanosine-3'-phosphate
  modified_base 19: mod_base = OTHER; note = 2'-fluoroguanosine-3'-phosphate
  modified_base 20: mod_base = OTHER; note = 2'-O-methylguanosine-3'-phosphate
  modified_base 21: mod_base = OTHER; note = 2'-fluoroadenosine-3'-phosphorothioate
  modified_base 22: mod_base = OTHER; note = 2'-deoxythymidine-3'-phosphate
  modified_base 23: mod_base = OTHER; note = 2'-deoxythymidine-3'-phosphate
ccgcttcccgggtaaatgggatt

SEQ ID NO: 249 - RNA, 23 nt, synthetic construct
  source 1..23: mol_type = other RNA
  modified_base 1: mod_base = OTHER; note = 2'-fluoroguanosine-3'-phosphate
  modified_base 2: mod_base = OTHER; note = 2'-O-methylcytidine-3'-phosphate
  modified_base 3: mod_base = OTHER; note = 2'-fluoroguanosine-3'-phosphate
  modified_base 4: mod_base = OTHER; note = 2'-O-methyladenosine-3'-phosphate
  modified_base 5: mod_base = OTHER; note = 2'-fluorouridine-3'-phosphate
  modified_base 6: mod_base = OTHER; note = 2'-O-methyluridine-3'-phosphate
  modified_base 7: mod_base = OTHER; note = 2'-fluorocytidine-3'-phosphate
  modified_base 8: mod_base = OTHER; note = 2'-O-methylcytidine-3'-phosphate
  modified_base 9: mod_base = OTHER; note = 2'-fluoroadenosine-3'-phosphate
  modified_base 10: mod_base = OTHER; note = 2'-O-methylguanosine-3'-phosphate
  modified_base 11: mod_base = OTHER; note = 2'-fluoroguanosine-3'-phosphate
  modified_base 12: mod_base = OTHER; note = 2'-O-methylguanosine-3'-phosphate
  modified_base 13: mod_base = OTHER; note = 2'-fluorouridine-3'-phosphate
  modified_base 14: mod_base = OTHER; note = 2'-O-methylguanosine-3'-phosphate
  modified_base 15: mod_base = OTHER; note = 2'-fluoroadenosine-3'-phosphate
  modified_base 16: mod_base = OTHER; note = 2'-O-methyladenosine-3'-phosphate
  modified_base 17: mod_base = OTHER; note = 2'-fluorouridine-3'-phosphate
  modified_base 18: mod_base = OTHER; note = 2'-O-methylguanosine-3'-phosphate
  modified_base 19: mod_base = OTHER; note = 2'-fluoroguanosine-3'-phosphate
  modified_base 20: mod_base = OTHER; note = 2'-O-methyladenosine-3'-phosphate
  modified_base 21: mod_base = OTHER; note = 2'-fluoroadenosine-3'-phosphorothioate
  modified_base 22: mod_base = OTHER; note = 2'-deoxythymidine-3'-phosphate
  modified_base 23: mod_base = OTHER; note = 2'-deoxythymidine-3'-phosphate
gcgattccagggtgaatggaatt

SEQ ID NO: 250 - RNA, 23 nt, synthetic construct
  source 1..23: mol_type = other RNA
  modified_base 1: mod_base = OTHER; note = 2'-fluorocytidine-3'-phosphate
  modified_base 2: mod_base = OTHER; note = 2'-O-methylcytidine-3'-phosphate
  modified_base 3: mod_base = OTHER; note = 2'-fluoroguanosine-3'-phosphate
  modified_base 4: mod_base = OTHER; note = 2'-O-methylcytidine-3'-phosphate
  modified_base 5: mod_base = OTHER; note = 2'-fluorouridine-3'-phosphate
  modified_base 6: mod_base = OTHER; note = 2'-O-methyluridine-3'-phosphate
  modified_base 7: mod_base = OTHER; note = 2'-fluorocytidine-3'-phosphate
  modified_base 8: mod_base = OTHER; note = 2'-O-methylcytidine-3'-phosphate
  modified_base 9: mod_base = OTHER; note = 2'-fluorocytidine-3'-phosphate
  modified_base 10: mod_base = OTHER; note = 2'-O-methylguanosine-3'-phosphate
  modified_base 11: mod_base = OTHER; note = 2'-fluoroguanosine-3'-phosphate
  modified_base 12: mod_base = OTHER; note = 2'-O-methylguanosine-3'-phosphate
  modified_base 13: mod_base = OTHER; note = 2'-fluorouridine-3'-phosphate
  modified_base 14: mod_base = OTHER; note = 2'-O-methylguanosine-3'-phosphate
  modified_base 15: mod_base = OTHER; note = 2'-fluoroadenosine-3'-phosphate
  modified_base 16: mod_base = OTHER; note = 2'-O-methyladenosine-3'-phosphate
  modified_base 17: mod_base = OTHER; note = 2'-fluorouridine-3'-phosphate
  modified_base 18: mod_base = OTHER; note = 2'-O-methylguanosine-3'-phosphate
  modified_base 19: mod_base = OTHER; note = 2'-fluoroguanosine-3'-phosphate
  modified_base 20: mod_base = OTHER; note = 2'-O-methyladenosine-3'-phosphate
  modified_base 21: mod_base = OTHER; note = 2'-fluoroadenosine-3'-phosphorothioate
  modified_base 22: mod_base = OTHER; note = 2'-deoxythymidine-3'-phosphate
  modified_base 23: mod_base = OTHER; note = 2'-deoxythymidine-3'-phosphate
ccgcttcccgggtgaatggaatt

SEQ ID NO: 251 - RNA, 23 nt, synthetic construct
  source 1..23: mol_type = other RNA
  modified_base 1: mod_base = OTHER; note = 2'-fluorocytidine-3'-phosphate
  modified_base 2: mod_base = OTHER; note = 2'-O-methylcytidine-3'-phosphate
  modified_base 3: mod_base = OTHER; note = 2'-fluoroguanosine-3'-phosphate
  modified_base 4: mod_base = OTHER; note = 2'-O-methylcytidine-3'-phosphate
  modified_base 5: mod_base = OTHER; note = 2'-fluorouridine-3'-phosphate
  modified_base 6: mod_base = OTHER; note = 2'-O-methyluridine-3'-phosphate
  modified_base 7: mod_base = OTHER; note = 2'-fluorocytidine-3'-phosphate
  modified_base 8: mod_base = OTHER; note = 2'-O-methylcytidine-3'-phosphate
  modified_base 9: mod_base = OTHER; note = 2'-fluoroadenosine-3'-phosphate
  modified_base 10: mod_base = OTHER; note = 2'-O-methylguanosine-3'-phosphate
  modified_base 11: mod_base = OTHER; note = 2'-fluoroguanosine-3'-phosphate
  modified_base 12: mod_base = OTHER; note = 2'-O-methylguanosine-3'-phosphate
  modified_base 13: mod_base = OTHER; note = 2'-fluorocytidine-3'-phosphate
  modified_base 14: mod_base = OTHER; note = 2'-O-methylguanosine-3'-phosphate
  modified_base 15: mod_base = OTHER; note = 2'-fluoroadenosine-3'-phosphate
  modified_base 16: mod_base = OTHER; note = 2'-O-methylguanosine-3'-phosphate
  modified_base 17: mod_base = OTHER; note = 2'-fluorouridine-3'-phosphate
  modified_base 18: mod_base = OTHER; note = 2'-O-methylguanosine-3'-phosphate
  modified_base 19: mod_base = OTHER; note = 2'-fluoroguanosine-3'-phosphate
  modified_base 20: mod_base = OTHER; note = 2'-O-methyladenosine-3'-phosphate
  modified_base 21: mod_base = OTHER; note = 2'-fluoroadenosine-3'-phosphorothioate
  modified_base 22: mod_base = OTHER; note = 2'-deoxythymidine-3'-phosphate
  modified_base 23: mod_base = OTHER; note = 2'-deoxythymidine-3'-phosphate
ccgcttccagggcgagtggaatt

SEQ ID NO: 252 - RNA, 23 nt, synthetic construct
  source 1..23: mol_type = other RNA
  modified_base 1: mod_base = OTHER; note = 2'-fluorocytidine-3'-phosphate
  modified_base 2: mod_base = OTHER; note = 2'-O-methylcytidine-3'-phosphate
  modified_base 3: mod_base = OTHER; note = 2'-fluoroadenosine-3'-phosphate
  modified_base 4: mod_base = OTHER; note = 2'-O-methylguanosine-3'-phosphate
  modified_base 5: mod_base = OTHER; note = 2'-fluoroguanosine-3'-phosphate
  modified_base 6: mod_base = OTHER; note = 2'-O-methyladenosine-3'-phosphate
  modified_base 7: mod_base = OTHER; note = 2'-fluoroguanosine-3'-phosphate
  modified_base 8: mod_base = OTHER; note = 2'-O-methyladenosine-3'-phosphate
  modified_base 9: mod_base = OTHER; note = 2'-fluorouridine-3'-phosphate
  modified_base 10: mod_base = OTHER; note = 2'-O-methylcytidine-3'-phosphate
  modified_base 11: mod_base = OTHER; note = 2'-fluoroadenosine-3'-phosphate
  modified_base 12: mod_base = OTHER; note = 2'-O-methylguanosine-3'-phosphate
  modified_base 13: mod_base = OTHER; note = 2'-fluoroadenosine-3'-phosphate
  modified_base 14: mod_base = OTHER; note = 2'-O-methyladenosine-3'-phosphate
  modified_base 15: mod_base = OTHER; note = 2'-fluorouridine-3'-phosphate
  modified_base 16: mod_base = OTHER; note = 2'-O-methylguanosine-3'-phosphate
  modified_base 17: mod_base = OTHER; note = 2'-fluorocytidine-3'-phosphate
  modified_base 18: mod_base = OTHER; note = 2'-O-methyluridine-3'-phosphate
  modified_base 19: mod_base = OTHER; note = 2'-fluoroguanosine-3'-phosphate
  modified_base 20: mod_base = OTHER; note = 2'-O-methyladenosine-3'-phosphate
  modified_base 21: mod_base = OTHER; note = 2'-fluoroadenosine-3'-phosphorothioate
  modified_base 22: mod_base = OTHER; note = 2'-O-methyluridine-3'-phosphorothioate
  modified_base 23: mod_base = OTHER; note = 2'-O-methyluridine-3'-phosphate
ccaggagatcagaatgctgaatt

SEQ ID NO: 253 - RNA, 23 nt, synthetic construct
  source 1..23: mol_type = other RNA
  modified_base 1: mod_base = OTHER; note = 2'-fluorouridine-3'-phosphate
  modified_base 2: mod_base = OTHER; note = 2'-O-methylcytidine-3'-phosphate
  modified_base 3: mod_base = OTHER; note = 2'-fluoroadenosine-3'-phosphate
  modified_base 4: mod_base = OTHER; note = 2'-O-methylguanosine-3'-phosphate
  modified_base 5: mod_base = OTHER; note = 2'-fluoroguanosine-3'-phosphate
  modified_base 6: mod_base = OTHER; note = 2'-O-methyladenosine-3'-phosphate
  modified_base 7: mod_base = OTHER; note = 2'-fluoroguanosine-3'-phosphate
  modified_base 8: mod_base = OTHER; note = 2'-O-methyladenosine-3'-phosphate
  modified_base 9: mod_base = OTHER; note = 2'-fluorouridine-3'-phosphate
  modified_base 10: mod_base = OTHER; note = 2'-O-methylcytidine-3'-phosphate
  modified_base 11: mod_base = OTHER; note = 2'-fluoroadenosine-3'-phosphate
  modified_base 12: mod_base = OTHER; note = 2'-O-methylguanosine-3'-phosphate
  modified_base 13: mod_base = OTHER; note = 2'-fluoroadenosine-3'-phosphate
  modified_base 14: mod_base = OTHER; note = 2'-O-methyladenosine-3'-phosphate
  modified_base 15: mod_base = OTHER; note = 2'-fluorouridine-3'-phosphate
  modified_base 16: mod_base = OTHER; note = 2'-O-methylguanosine-3'-phosphate
  modified_base 17: mod_base = OTHER; note = 2'-fluorocytidine-3'-phosphate
  modified_base 18: mod_base = OTHER; note = 2'-O-methyluridine-3'-phosphate
  modified_base 19: mod_base = OTHER; note = 2'-fluoroguanosine-3'-phosphate
  modified_base 20: mod_base = OTHER; note = 2'-O-methyladenosine-3'-phosphate
  modified_base 21: mod_base = OTHER; note = 2'-fluoroadenosine-3'-phosphorothioate
  modified_base 22: mod_base = OTHER; note = 2'-O-methyluridine-3'-phosphorothioate
  modified_base 23: mod_base = OTHER; note = 2'-O-methyluridine-3'-phosphate
tcaggagatcagaatgctgaatt

SEQ ID NO: 254 - RNA, 23 nt, synthetic construct
  source 1..23: mol_type = other RNA
  modified_base 1: mod_base = OTHER; note = 2'-fluoroguanosine-3'-phosphate
  modified_base 2: mod_base = OTHER; note = 2'-O-methylguanosine-3'-phosphate
  modified_base 3: mod_base = OTHER; note = 2'-fluoroadenosine-3'-phosphate
  modified_base 4: mod_base = OTHER; note = 2'-O-methylguanosine-3'-phosphate
  modified_base 5: mod_base = OTHER; note = 2'-fluoroadenosine-3'-phosphate
  modified_base 6: mod_base = OTHER; note = 2'-O-methyluridine-3'-phosphate
  modified_base 7: mod_base = OTHER; note = 2'-fluorocytidine-3'-phosphate
  modified_base 8: mod_base = OTHER; note = 2'-O-methyladenosine-3'-phosphate
  modified_base 9: mod_base = OTHER; note = 2'-fluoroguanosine-3'-phosphate
  modified_base 10: mod_base = OTHER; note = 2'-O-methyladenosine-3'-phosphate
  modified_base 11: mod_base = OTHER; note = 2'-fluoroadenosine-3'-phosphate
  modified_base 12: mod_base = OTHER; note = 2'-O-methyluridine-3'-phosphate
  modified_base 13: mod_base = OTHER; note = 2'-fluoroguanosine-3'-phosphate
  modified_base 14: mod_base = OTHER; note = 2'-O-methylcytidine-3'-phosphate
  modified_base 15: mod_base = OTHER; note = 2'-fluorouridine-3'-phosphate
  modified_base 16: mod_base = OTHER; note = 2'-O-methylguanosine-3'-phosphate
  modified_base 17: mod_base = OTHER; note = 2'-fluoroadenosine-3'-phosphate
  modified_base 18: mod_base = OTHER; note = 2'-O-methyladenosine-3'-phosphate
  modified_base 19: mod_base = OTHER; note = 2'-fluoroguanosine-3'-phosphate
  modified_base 20: mod_base = OTHER; note = 2'-O-methyladenosine-3'-phosphate
  modified_base 21: mod_base = OTHER; note = 2'-fluoroadenosine-3'-phosphorothioate
  modified_base 22: mod_base = OTHER; note = 2'-O-methyluridine-3'-phosphorothioate
  modified_base 23: mod_base = OTHER; note = 2'-O-methyluridine-3'-phosphate
ggagatcagaatgctgaagaatt

SEQ ID NO: 255 - RNA, 23 nt, synthetic construct
  source 1..23: mol_type = other RNA
  modified_base 1: mod_base = OTHER; note = 2'-fluorouridine-3'-phosphate
  modified_base 2: mod_base = OTHER; note = 2'-O-methylcytidine-3'-phosphate
  modified_base 3: mod_base = OTHER; note = 2'-fluoroadenosine-3'-phosphate
  modified_base 4: mod_base = OTHER; note = 2'-O-methyluridine-3'-phosphate
  modified_base 5: mod_base = OTHER; note = 2'-fluoroguanosine-3'-phosphate
  modified_base 6: mod_base = OTHER; note = 2'-O-methylcytidine-3'-phosphate
  modified_base 7: mod_base = OTHER; note = 2'-fluoroadenosine-3'-phosphate
  modified_base 8: mod_base = OTHER; note = 2'-O-methylcytidine-3'-phosphate
  modified_base 9: mod_base = OTHER; note = 2'-fluoroadenosine-3'-phosphate
  modified_base 10: mod_base = OTHER; note = 2'-O-methyluridine-3'-phosphate
  modified_base 11: mod_base = OTHER; note = 2'-fluoroadenosine-3'-phosphate
  modified_base 12: mod_base = OTHER; note = 2'-O-methylcytidine-3'-phosphate
  modified_base 13: mod_base = OTHER; note = 2'-fluoroadenosine-3'-phosphate
  modified_base 14: mod_base = OTHER; note = 2'-O-methyladenosine-3'-phosphate
  modified_base 15: mod_base = OTHER; note = 2'-fluorocytidine-3'-phosphate
  modified_base 16: mod_base = OTHER; note = 2'-O-methyladenosine-3'-phosphate
  modified_base 17: mod_base = OTHER; note = 2'-fluorocytidine-3'-phosphate
  modified_base 18: mod_base = OTHER; note = 2'-O-methyladenosine-3'-phosphate
  modified_base 19: mod_base = OTHER; note = 2'-fluoroguanosine-3'-phosphate
  modified_base 20: mod_base = OTHER; note = 2'-O-methyladenosine-3'-phosphate
  modified_base 21: mod_base = OTHER; note = 2'-fluoroadenosine-3'-phosphorothioate
  modified_base 22: mod_base = OTHER; note = 2'-O-methyluridine-3'-phosphorothioate
  modified_base 23: mod_base = OTHER; note = 2'-O-methyluridine-3'-phosphate
tcatgcacatacaacacagaatt

SEQ ID NO: 256 - RNA, 23 nt, synthetic construct
  source 1..23: mol_type = other RNA
  modified_base 1: mod_base = OTHER; note = 2'-fluorouridine-3'-phosphate
  modified_base 2: mod_base = OTHER; note = 2'-O-methylcytidine-3'-phosphate
  modified_base 3: mod_base = OTHER; note = 2'-fluoroguanosine-3'-phosphate
  modified_base 4: mod_base = OTHER; note = 2'-O-methyluridine-3'-phosphate
  modified_base 5: mod_base = OTHER; note = 2'-fluoroguanosine-3'-phosphate
  modified_base 6: mod_base = OTHER; note = 2'-O-methylcytidine-3'-phosphate
  modified_base 7: mod_base = OTHER; note = 2'-fluoroadenosine-3'-phosphate
  modified_base 8: mod_base = OTHER; note = 2'-O-methylcytidine-3'-phosphate
  modified_base 9: mod_base = OTHER; note = 2'-fluoroadenosine-3'-phosphate
  modified_base 10: mod_base = OTHER; note = 2'-O-methyluridine-3'-phosphate
  modified_base 11: mod_base = OTHER; note = 2'-fluoroadenosine-3'-phosphate
  modified_base 12: mod_base = OTHER; note = 2'-O-methylcytidine-3'-phosphate
  modified_base 13: mod_base = OTHER; note = 2'-fluoroadenosine-3'-phosphate
  modified_base 14: mod_base = OTHER; note = 2'-O-methyladenosine-3'-phosphate
  modified_base 15: mod_base = OTHER; note = 2'-fluorocytidine-3'-phosphate
  modified_base 16: mod_base = OTHER; note = 2'-O-methyladenosine-3'-phosphate
  modified_base 17: mod_base = OTHER; note = 2'-fluorocytidine-3'-phosphate
  modified_base 18: mod_base = OTHER; note = 2'-O-methyladenosine-3'-phosphate
  modified_base 19: mod_base = OTHER; note = 2'-fluoroguanosine-3'-phosphate
  modified_base 20: mod_base = OTHER; note = 2'-O-methyladenosine-3'-phosphate
  modified_base 21: mod_base = OTHER; note = 2'-fluoroadenosine-3'-phosphorothioate
  modified_base 22: mod_base = OTHER; note = 2'-O-methyluridine-3'-phosphorothioate
  modified_base 23: mod_base = OTHER; note = 2'-O-methyluridine-3'-phosphate
tcgtgcacatacaacacagaatt

SEQ ID NO: 257 - RNA, 23 nt, synthetic construct
  source 1..23: mol_type = other RNA
  modified_base 1: mod_base = OTHER; note = 2'-fluorouridine-3'-phosphate
  modified_base 2: mod_base = OTHER; note = 2'-O-methylcytidine-3'-phosphate
  modified_base 3: mod_base = OTHER; note = 2'-fluorocytidine-3'-phosphate
  modified_base 4: mod_base = OTHER; note = 2'-O-methyluridine-3'-phosphate
  modified_base 5: mod_base = OTHER; note = 2'-fluoroguanosine-3'-phosphate
  modified_base 6: mod_base = OTHER; note = 2'-O-methyluridine-3'-phosphate
  modified_base 7: mod_base = OTHER; note = 2'-fluoroadenosine-3'-phosphate
  modified_base 8: mod_base = OTHER; note = 2'-O-methylcytidine-3'-phosphate
  modified_base 9: mod_base = OTHER; note = 2'-fluoroadenosine-3'-phosphate
  modified_base 10: mod_base = OTHER; note = 2'-O-methyluridine-3'-phosphate
  modified_base 11: mod_base = OTHER; note = 2'-fluoroadenosine-3'-phosphate
  modified_base 12: mod_base = OTHER; note = 2'-O-methylcytidine-3'-phosphate
  modified_base 13: mod_base = OTHER; note = 2'-fluoroadenosine-3'-phosphate
  modified_base 14: mod_base = OTHER; note = 2'-O-methyladenosine-3'-phosphate
  modified_base 15: mod_base = OTHER; note = 2'-fluorocytidine-3'-phosphate
  modified_base 16: mod_base = OTHER; note = 2'-O-methyladenosine-3'-phosphate
  modified_base 17: mod_base = OTHER; note = 2'-fluorocytidine-3'-phosphate
  modified_base 18: mod_base = OTHER; note = 2'-O-methyladenosine-3'-phosphate
  modified_base 19: mod_base = OTHER; note = 2'-fluoroguanosine-3'-phosphate
  modified_base 20: mod_base = OTHER; note = 2'-O-methyladenosine-3'-phosphate
  modified_base 21: mod_base = OTHER; note = 2'-fluoroadenosine-3'-phosphorothioate
  modified_base 22: mod_base = OTHER; note = 2'-O-methyluridine-3'-phosphorothioate
  modified_base 23: mod_base = OTHER; note = 2'-O-methyluridine-3'-phosphate
tcctgtacatacaacacagaatt

SEQ ID NO: 258 - RNA, 23 nt, synthetic construct
  source 1..23: mol_type = other RNA
  modified_base 1: mod_base = OTHER; note = 2'-fluorouridine-3'-phosphate
  modified_base 2: mod_base = OTHER; note = 2'-O-methylcytidine-3'-phosphate
  modified_base 3: mod_base = OTHER; note = 2'-fluorocytidine-3'-phosphate
  modified_base 4: mod_base = OTHER; note = 2'-O-methyluridine-3'-phosphate
  modified_base 5: mod_base = OTHER; note = 2'-fluoroguanosine-3'-phosphate
  modified_base 6: mod_base = OTHER; note = 2'-O-methylcytidine-3'-phosphate
  modified_base 7: mod_base = OTHER; note = 2'-fluoroadenosine-3'-phosphate
  modified_base 8: mod_base = OTHER; note = 2'-O-methylcytidine-3'-phosphate
  modified_base 9: mod_base = OTHER; note = 2'-fluoroguanosine-3'-phosphate
  modified_base 10: mod_base = OTHER; note = 2'-O-methyluridine-3'-phosphate
  modified_base 11: mod_base = OTHER; note = 2'-fluoroadenosine-3'-phosphate
  modified_base 12: mod_base = OTHER; note = 2'-O-methylcytidine-3'-phosphate
  modified_base 13: mod_base = OTHER; note = 2'-fluoroadenosine-3'-phosphate
  modified_base 14: mod_base = OTHER; note = 2'-O-methyladenosine-3'-phosphate
  modified_base 15: mod_base = OTHER; note = 2'-fluorocytidine-3'-phosphate
  modified_base 16: mod_base = OTHER; note = 2'-O-methyladenosine-3'-phosphate
  modified_base 17: mod_base = OTHER; note = 2'-fluorocytidine-3'-phosphate
  modified_base 18: mod_base = OTHER; note = 2'-O-methylguanosine-3'-phosphate
  modified_base 19: mod_base = OTHER; note = 2'-fluoroguanosine-3'-phosphate
  modified_base 20: mod_base = OTHER; note = 2'-O-methyladenosine-3'-phosphate
  modified_base 21: mod_base = OTHER; note = 2'-fluoroadenosine-3'-phosphorothioate
  modified_base 22: mod_base = OTHER; note = 2'-O-methyluridine-3'-phosphorothioate
  modified_base 23: mod_base = OTHER; note = 2'-O-methyluridine-3'-phosphate
tcctgcacgtacaacacggaatt

SEQ ID NO: 259 - RNA, 23 nt, synthetic construct
  source 1..23: mol_type = other RNA
  modified_base 1: mod_base = OTHER; note = 2'-fluorouridine-3'-phosphate
  modified_base 2: mod_base = OTHER; note = 2'-O-methylcytidine-3'-phosphate
  modified_base 3: mod_base = OTHER; note = 2'-fluorocytidine-3'-phosphate
  modified_base 4: mod_base = OTHER; note = 2'-O-methyluridine-3'-phosphate
  modified_base 5: mod_base = OTHER; note = 2'-fluoroguanosine-3'-phosphate
  modified_base 6: mod_base = OTHER; note = 2'-O-methyluridine-3'-phosphate
  modified_base 7: mod_base = OTHER; note = 2'-fluoroadenosine-3'-phosphate
  modified_base 8: mod_base = OTHER; note = 2'-O-methylcytidine-3'-phosphate
  modified_base 9: mod_base = OTHER; note = 2'-fluoroguanosine-3'-phosphate
  modified_base 10: mod_base = OTHER; note = 2'-O-methyluridine-3'-phosphate
  modified_base 11: mod_base = OTHER; note = 2'-fluoroadenosine-3'-phosphate
  modified_base 12: mod_base = OTHER; note = 2'-O-methylcytidine-3'-phosphate
  modified_base 13: mod_base = OTHER; note = 2'-fluoroadenosine-3'-phosphate
  modified_base 14: mod_base = OTHER; note = 2'-O-methyladenosine-3'-phosphate
  modified_base 15: mod_base = OTHER; note = 2'-fluorocytidine-3'-phosphate
  modified_base 16: mod_base = OTHER; note = 2'-O-methyladenosine-3'-phosphate
  modified_base 17: mod_base = OTHER; note = 2'-fluorocytidine-3'-phosphate
  modified_base 18: mod_base = OTHER; note = 2'-O-methyladenosine-3'-phosphate
  modified_base 19: mod_base = OTHER; note = 2'-fluoroguanosine-3'-phosphate
  modified_base 20: mod_base = OTHER; note = 2'-O-methyladenosine-3'-phosphate
  modified_base 21: mod_base = OTHER; note = 2'-fluoroadenosine-3'-phosphorothioate
  modified_base 22: mod_base = OTHER; note = 2'-O-methyluridine-3'-phosphorothioate
  modified_base 23: mod_base = OTHER; note = 2'-O-methyluridine-3'-phosphate
tcctgtacgtacaacacagaatt

SEQ ID NO: 260 - RNA, 23 nt, synthetic construct
  source 1..23: mol_type = other RNA
  modified_base 1: mod_base = OTHER; note = 2'-fluorouridine-3'-phosphate
  modified_base 2: mod_base = OTHER; note = 2'-O-methylcytidine-3'-phosphate
  modified_base 3: mod_base = OTHER; note = 2'-fluorouridine-3'-phosphate
  modified_base 4: mod_base = OTHER; note = 2'-O-methyluridine-3'-phosphate
  modified_base 5: mod_base = OTHER; note = 2'-fluoroguanosine-3'-phosphate
  modified_base 6: mod_base = OTHER; note = 2'-O-methylcytidine-3'-phosphate
  modified_base 7: mod_base = OTHER; note = 2'-fluoroadenosine-3'-phosphate
  modified_base 8: mod_base = OTHER; note = 2'-O-methylcytidine-3'-phosphate
  modified_base 9: mod_base = OTHER; note = 2'-fluoroadenosine-3'-phosphate
  modified_base 10: mod_base = OTHER; note = 2'-O-methyluridine-3'-phosphate
  modified_base 11: mod_base = OTHER; note = 2'-fluoroadenosine-3'-phosphate
  modified_base 12: mod_base = OTHER; note = 2'-O-methylcytidine-3'-phosphate
  modified_base 13: mod_base = OTHER; note = 2'-fluoroadenosine-3'-phosphate
  modified_base 14: mod_base = OTHER; note = 2'-O-methyladenosine-3'-phosphate
  modified_base 15: mod_base = OTHER; note = 2'-fluorocytidine-3'-phosphate
  modified_base 16: mod_base = OTHER; note = 2'-O-methyladenosine-3'-phosphate
  modified_base 17: mod_base = OTHER; note = 2'-fluorocytidine-3'-phosphate
  modified_base 18: mod_base = OTHER; note = 2'-O-methylguanosine-3'-phosphate
  modified_base 19: mod_base = OTHER; note = 2'-fluoroguanosine-3'-phosphate
  modified_base 20: mod_base = OTHER; note = 2'-O-methyladenosine-3'-phosphate
  modified_base 21: mod_base = OTHER; note = 2'-fluoroadenosine-3'-phosphorothioate
  modified_base 22: mod_base = OTHER; note = 2'-O-methyluridine-3'-phosphorothioate
  modified_base 23: mod_base = OTHER; note = 2'-O-methyluridine-3'-phosphate
tcttgcacatacaacacggaatt

SEQ ID NO: 261 - RNA, 23 nt, synthetic construct
  source 1..23: mol_type = other RNA
  modified_base 1: mod_base = OTHER; note = 2'-fluorocytidine-3'-phosphate
  modified_base 2: mod_base = OTHER; note = 2'-O-methylcytidine-3'-phosphate
  modified_base 3: mod_base = OTHER; note = 2'-fluoroguanosine-3'-phosphate
  modified_base 4: mod_base = OTHER; note = 2'-O-methylcytidine-3'-phosphate
  modified_base 5: mod_base = OTHER; note = 2'-fluorouridine-3'-phosphate
  modified_base 6: mod_base = OTHER; note = 2'-O-methyluridine-3'-phosphate
  modified_base 7: mod_base = OTHER; note = 2'-fluorocytidine-3'-phosphate
  modified_base 8: mod_base = OTHER; note = 2'-O-methylcytidine-3'-phosphate
  modified_base 9: mod_base = OTHER; note = 2'-fluorocytidine-3'-phosphate
  modified_base 10: mod_base = OTHER; note = 2'-O-methylguanosine-3'-phosphate
  modified_base 11: mod_base = OTHER; note = 2'-fluoroguanosine-3'-phosphate
  modified_base 12: mod_base = OTHER; note = 2'-O-methylguanosine-3'-phosphate
  modified_base 13: mod_base = OTHER; note = 2'-fluorouridine-3'-phosphate
  modified_base 14: mod_base = OTHER; note = 2'-O-methylguanosine-3'-phosphate
  modified_base 15: mod_base = OTHER; note = 2'-fluoroadenosine-3'-phosphate
  modified_base 16: mod_base = OTHER; note = 2'-O-methylguanosine-3'-phosphate
  modified_base 17: mod_base = OTHER; note = 2'-fluorouridine-3'-phosphate
  modified_base 18: mod_base = OTHER; note = 2'-O-methylguanosine-3'-phosphate
  modified_base 19: mod_base = OTHER; note = 2'-fluoroguanosine-3'-phosphate
  modified_base 20: mod_base = OTHER; note = 2'-O-methyladenosine-3'-phosphate
  modified_base 21: mod_base = OTHER; note = 2'-fluoroadenosine-3'-phosphorothioate
  modified_base 22: mod_base = OTHER; note = 2'-O-methyluridine-3'-phosphorothioate
  modified_base 23: mod_base = OTHER; note = 2'-O-methyluridine-3'-phosphate
ccgcttcccgggtgagtggaatt

SEQ ID NO: 262 - RNA, 23 nt, synthetic construct
  source 1..23: mol_type = other RNA
  modified_base 1: mod_base = OTHER; note = 2'-fluorocytidine-3'-phosphate
  modified_base 2: mod_base = OTHER; note = 2'-O-methylcytidine-3'-phosphate
  modified_base 3: mod_base = OTHER; note = 2'-fluoroguanosine-3'-phosphate
  modified_base 4: mod_base = OTHER; note = 2'-O-methylcytidine-3'-phosphate
  modified_base 5: mod_base = OTHER; note = 2'-fluorouridine-3'-phosphate
  modified_base 6: mod_base = OTHER; note = 2'-O-methyluridine-3'-phosphate
  modified_base 7: mod_base = OTHER; note = 2'-fluorocytidine-3'-phosphate
  modified_base 8: mod_base = OTHER; note = 2'-O-methylcytidine-3'-phosphate
  modified_base 9: mod_base = OTHER; note = 2'-fluorocytidine-3'-phosphate
  modified_base 10: mod_base = OTHER; note = 2'-O-methylguanosine-3'-phosphate
  modified_base 11: mod_base = OTHER; note = 2'-fluoroguanosine-3'-phosphate
  modified_base 12: mod_base = OTHER; note = 2'-O-methylguanosine-3'-phosphate
  modified_base 13: mod_base = OTHER; note = 2'-fluorouridine-3'-phosphate
  modified_base 14: mod_base = OTHER; note = 2'-O-methyladenosine-3'-phosphate
  modified_base 15: mod_base = OTHER; note = 2'-fluoroadenosine-3'-phosphate
  modified_base 16: mod_base = OTHER; note = 2'-O-methylcytidine-3'-phosphate
  modified_base 17: mod_base = OTHER; note = 2'-fluorouridine-3'-phosphate
  modified_base 18: mod_base = OTHER; note = 2'-O-methylguanosine-3'-phosphate
  modified_base 19: mod_base = OTHER; note = 2'-fluoroguanosine-3'-phosphate
  modified_base 20: mod_base = OTHER; note = 2'-O-methyladenosine-3'-phosphate
  modified_base 21: mod_base = OTHER; note = 2'-fluoroadenosine-3'-phosphorothioate
  modified_base 22: mod_base = OTHER; note = 2'-O-methyluridine-3'-phosphorothioate
  modified_base 23: mod_base = OTHER; note = 2'-O-methyluridine-3'-phosphate
ccgcttcccgggtaactggaatt

SEQ ID NO: 263 - RNA, 23 nt, synthetic construct
  source 1..23: mol_type = other RNA
  modified_base 1: mod_base = OTHER; note = 2'-fluorocytidine-3'-phosphate
  modified_base 2: mod_base = OTHER; note = 2'-O-methylcytidine-3'-phosphate
  modified_base 3: mod_base = OTHER; note = 2'-fluoroguanosine-3'-phosphate
  modified_base 4: mod_base = OTHER; note = 2'-O-methylcytidine-3'-phosphate
  modified_base 5: mod_base = OTHER; note = 2'-fluorouridine-3'-phosphate
  modified_base 6: mod_base = OTHER; note = 2'-O-methyluridine-3'-phosphate
  modified_base 7: mod_base = OTHER; note = 2'-fluorocytidine-3'-phosphate
  modified_base 8: mod_base = OTHER; note = 2'-O-methylcytidine-3'-phosphate
  modified_base 9: mod_base = OTHER; note = 2'-fluorocytidine-3'-phosphate
  modified_base 10: mod_base = OTHER; note = 2'-O-methylguanosine-3'-phosphate
  modified_base 11: mod_base = OTHER; note = 2'-fluoroguanosine-3'-phosphate
  modified_base 12: mod_base = OTHER; note = 2'-O-methylguanosine-3'-phosphate
  modified_base 13: mod_base = OTHER; note = 2'-fluorouridine-3'-phosphate
  modified_base 14: mod_base = OTHER; note = 2'-O-methyladenosine-3'-phosphate
  modified_base 15: mod_base = OTHER; note = 2'-fluoroadenosine-3'-phosphate
  modified_base 16: mod_base = OTHER; note = 2'-O-methyladenosine-3'-phosphate
  modified_base 17: mod_base = OTHER; note = 2'-fluorouridine-3'-phosphate
  modified_base 18: mod_base = OTHER; note = 2'-O-methylguanosine-3'-phosphate
  modified_base 19: mod_base = OTHER; note = 2'-fluoroguanosine-3'-phosphate
  modified_base 20: mod_base = OTHER; note = 2'-O-methylguanosine-3'-phosphate
  modified_base 21: mod_base = OTHER; note = 2'-fluoroadenosine-3'-phosphorothioate
  modified_base 22: mod_base = OTHER; note = 2'-O-methyluridine-3'-phosphorothioate
  modified_base 23: mod_base = OTHER; note = 2'-O-methyluridine-3'-phosphate
ccgcttcccgggtaaatgggatt

SEQ ID NO: 264 - RNA, 23 nt, synthetic construct
  source 1..23: mol_type = other RNA
  modified_base 1: mod_base = OTHER; note = 2'-fluoroguanosine-3'-phosphate
  modified_base 2: mod_base = OTHER; note = 2'-O-methylcytidine-3'-phosphate
  modified_base 3: mod_base = OTHER; note = 2'-fluoroguanosine-3'-phosphate
  modified_base 4: mod_base = OTHER; note = 2'-O-methyladenosine-3'-phosphate
  modified_base 5: mod_base = OTHER; note = 2'-fluorouridine-3'-phosphate
  modified_base 6: mod_base = OTHER; note = 2'-O-methyluridine-3'-phosphate
  modified_base 7: mod_base = OTHER; note = 2'-fluorocytidine-3'-phosphate
  modified_base 8: mod_base = OTHER; note = 2'-O-methylcytidine-3'-phosphate
  modified_base 9: mod_base = OTHER; note = 2'-fluoroadenosine-3'-phosphate
  modified_base 10: mod_base = OTHER; note = 2'-O-methylguanosine-3'-phosphate
  modified_base 11: mod_base = OTHER; note = 2'-fluoroguanosine-3'-phosphate
  modified_base 12: mod_base = OTHER; note = 2'-O-methylguanosine-3'-phosphate
  modified_base 13: mod_base = OTHER; note = 2'-fluorouridine-3'-phosphate
  modified_base 14: mod_base = OTHER; note = 2'-O-methylguanosine-3'-phosphate
  modified_base 15: mod_base = OTHER; note = 2'-fluoroadenosine-3'-phosphate
  modified_base 16: mod_base = OTHER; note = 2'-O-methyladenosine-3'-phosphate
  modified_base 17: mod_base = OTHER; note = 2'-fluorouridine-3'-phosphate
  modified_base 18: mod_base = OTHER; note = 2'-O-methylguanosine-3'-phosphate
  modified_base 19: mod_base = OTHER; note = 2'-fluoroguanosine-3'-phosphate
  modified_base 20: mod_base = OTHER; note = 2'-O-methyladenosine-3'-phosphate
  modified_base 21: mod_base = OTHER; note = 2'-fluoroadenosine-3'-phosphorothioate
  modified_base 22: mod_base = OTHER; note = 2'-O-methyluridine-3'-phosphorothioate
  modified_base 23: mod_base = OTHER; note = 2'-O-methyluridine-3'-phosphate
gcgattccagggtgaatggaatt

SEQ ID NO: 265 - RNA, 23 nt, synthetic construct
  source 1..23: mol_type = other RNA
  modified_base 1: mod_base = OTHER; note = 2'-fluorocytidine-3'-phosphate
  modified_base 2: mod_base = OTHER; note = 2'-O-methylcytidine-3'-phosphate
  modified_base 3: mod_base = OTHER; note = 2'-fluoroguanosine-3'-phosphate
  modified_base 4: mod_base = OTHER; note = 2'-O-methylcytidine-3'-phosphate
  modified_base 5: mod_base = OTHER; note = 2'-fluorouridine-3'-phosphate
  modified_base 6: mod_base = OTHER; note = 2'-O-methyluridine-3'-phosphate
  modified_base 7: mod_base = OTHER; note = 2'-fluorocytidine-3'-phosphate
  modified_base 8: mod_base = OTHER; note = 2'-O-methylcytidine-3'-phosphate
  modified_base 9: mod_base = OTHER; note = 2'-fluorocytidine-3'-phosphate
  modified_base 10: mod_base = OTHER; note = 2'-O-methylguanosine-3'-phosphate
  modified_base 11: mod_base = OTHER; note = 2'-fluoroguanosine-3'-phosphate
  modified_base 12: mod_base = OTHER; note = 2'-O-methylguanosine-3'-phosphate
  modified_base 13: mod_base = OTHER; note = 2'-fluorouridine-3'-phosphate
  modified_base 14: mod_base = OTHER; note = 2'-O-methylguanosine-3'-phosphate
  modified_base 15: mod_base = OTHER; note = 2'-fluoroadenosine-3'-phosphate
  modified_base 16: mod_base = OTHER; note = 2'-O-methyladenosine-3'-phosphate
  modified_base 17: mod_base = OTHER; note = 2'-fluorouridine-3'-phosphate
  modified_base 18: mod_base = OTHER; note = 2'-O-methylguanosine-3'-phosphate
  modified_base 19: mod_base = OTHER; note = 2'-fluoroguanosine-3'-phosphate
  modified_base 20: mod_base = OTHER; note = 2'-O-methyladenosine-3'-phosphate
  modified_base 21: mod_base = OTHER; note = 2'-fluoroadenosine-3'-phosphorothioate
  modified_base 22: mod_base = OTHER; note = 2'-O-methyluridine-3'-phosphorothioate
  modified_base 23: mod_base = OTHER; note = 2'-O-methyluridine-3'-phosphate
ccgcttcccgggtgaatggaatt

SEQ ID NO: 266 - RNA, 23 nt, synthetic construct
  source 1..23: mol_type = other RNA
  modified_base 1: mod_base = OTHER; note = 2'-fluorocytidine-3'-phosphate
  modified_base 2: mod_base = OTHER; note = 2'-O-methylcytidine-3'-phosphate
  modified_base 3: mod_base = OTHER; note = 2'-fluoroguanosine-3'-phosphate
  modified_base 4: mod_base = OTHER; note = 2'-O-methylcytidine-3'-phosphate
  modified_base 5: mod_base = OTHER; note = 2'-fluorouridine-3'-phosphate
  modified_base 6: mod_base = OTHER; note = 2'-O-methyluridine-3'-phosphate
  modified_base 7: mod_base = OTHER; note = 2'-fluorocytidine-3'-phosphate
  modified_base 8: mod_base = OTHER; note = 2'-O-methylcytidine-3'-phosphate
  modified_base 9: mod_base = OTHER; note = 2'-fluoroadenosine-3'-phosphate
  modified_base 10: mod_base = OTHER; note = 2'-O-methylguanosine-3'-phosphate
  modified_base 11: mod_base = OTHER; note = 2'-fluoroguanosine-3'-phosphate
  modified_base 12: mod_base = OTHER; note = 2'-O-methylguanosine-3'-phosphate
  modified_base 13: mod_base = OTHER; note = 2'-fluorocytidine-3'-phosphate
  modified_base 14: mod_base = OTHER; note = 2'-O-methylguanosine-3'-phosphate
  modified_base 15: mod_base = OTHER; note = 2'-fluoroadenosine-3'-phosphate
  modified_base 16: mod_base = OTHER; note = 2'-O-methylguanosine-3'-phosphate
  modified_base 17: mod_base = OTHER; note = 2'-fluorouridine-3'-phosphate
  modified_base 18: mod_base = OTHER; note = 2'-O-methylguanosine-3'-phosphate
  modified_base 19: mod_base = OTHER; note = 2'-fluoroguanosine-3'-phosphate
  modified_base 20: mod_base = OTHER; note = 2'-O-methyladenosine-3'-phosphate
  modified_base 21: mod_base = OTHER; note = 2'-fluoroadenosine-3'-phosphorothioate
  modified_base 22: mod_base = OTHER; note = 2'-O-methyluridine-3'-phosphorothioate
  modified_base 23: mod_base = OTHER; note = 2'-O-methyluridine-3'-phosphate
ccgcttccagggcgagtggaatt

SEQ ID NO: 267 - RNA, 23 nt, synthetic construct
  source 1..23: mol_type = other RNA
  modified_base 1: mod_base = OTHER; note = 2'-O-methylcytidine-3'-phosphorothioate
  modified_base 2: mod_base = OTHER; note = 2'-O-methylcytidine-3'-phosphorothioate
  modified_base 3: mod_base = OTHER; note = 2'-O-methyladenosine-3'-phosphate
  modified_base 4: mod_base = OTHER; note = 2'-O-methylguanosine-3'-phosphate
  modified_base 5: mod_base = OTHER; note = 2'-fluoroguanosine-3'-phosphate
  modified_base 6: mod_base = OTHER; note = 2'-O-methyladenosine-3'-phosphate
  modified_base 7: mod_base = OTHER; note = 2'-fluoroguanosine-3'-phosphate
  modified_base 8: mod_base = OTHER; note = 2'-fluoroadenosine-3'-phosphate
  modified_base 9: mod_base = OTHER; note = 2'-fluorouridine-3'-phosphate
  modified_base 10: mod_base = OTHER; note = 2'-O-methylcytidine-3'-phosphate
  modified_base 11: mod_base = OTHER; note = 2'-O-methyladenosine-3'-phosphate
  modified_base 12: mod_base = OTHER; note = 2'-O-methylguanosine-3'-phosphate
  modified_base 13: mod_base = OTHER; note = 2'-O-methyladenosine-3'-phosphate
  modified_base 14: mod_base = OTHER; note = 2'-O-methyladenosine-3'-phosphate
  modified_base 15: mod_base = OTHER; note = 2'-O-methyluridine-3'-phosphate
  modified_base 16: mod_base = OTHER; note = 2'-O-methylguanosine-3'-phosphate
  modified_base 17: mod_base = OTHER; note = 2'-O-methylcytidine-3'-phosphate
  modified_base 18: mod_base = OTHER; note = 2'-O-methyluridine-3'-phosphate
  modified_base 19: mod_base = OTHER; note = 2'-O-methylguanosine-3'-phosphate
  modified_base 20: mod_base = OTHER; note = 2'-O-methyladenosine-3'-phosphate
  modified_base 21: mod_base = OTHER; note = 2'-O-methyladenosine-3'-phosphorothioate
  modified_base 22: mod_base = OTHER; note = 2'-O-methyluridine-3'-phosphorothioate
  modified_base 23: mod_base = OTHER; note = 2'-O-methyluridine-3'-phosphate
ccaggagatcagaatgctgaatt

SEQ ID NO: 268 - RNA, 23 nt, synthetic construct
  source 1..23: mol_type = other RNA
  modified_base 1: mod_base = OTHER; note = 2'-O-methyluridine-3'-phosphorothioate
  modified_base 2: mod_base = OTHER; note = 2'-O-methylcytidine-3'-phosphorothioate
  modified_base 3: mod_base = OTHER; note = 2'-O-methyladenosine-3'-phosphate
  modified_base 4: mod_base = OTHER; note = 2'-O-methylguanosine-3'-phosphate
  modified_base 5: mod_base = OTHER; note = 2'-fluoroguanosine-3'-phosphate
  modified_base 6: mod_base = OTHER; note = 2'-O-methyladenosine-3'-phosphate
  modified_base 7: mod_base = OTHER; note = 2'-fluoroguanosine-3'-phosphate
  modified_base 8: mod_base = OTHER; note = 2'-fluoroadenosine-3'-phosphate
  modified_base 9: mod_base = OTHER; note = 2'-fluorouridine-3'-phosphate
  modified_base 10: mod_base = OTHER; note = 2'-O-methylcytidine-3'-phosphate
  modified_base 11: mod_base = OTHER; note = 2'-O-methyladenosine-3'-phosphate
  modified_base 12: mod_base = OTHER; note = 2'-O-methylguanosine-3'-phosphate
  modified_base 13: mod_base = OTHER; note = 2'-O-methyladenosine-3'-phosphate
  modified_base 14: mod_base = OTHER; note = 2'-O-methyladenosine-3'-phosphate
  modified_base 15: mod_base = OTHER; note = 2'-O-methyluridine-3'-phosphate
  modified_base 16: mod_base = OTHER; note = 2'-O-methylguanosine-3'-phosphate
  modified_base 17: mod_base = OTHER; note = 2'-O-methylcytidine-3'-phosphate
  modified_base 18: mod_base = OTHER; note = 2'-O-methyluridine-3'-phosphate
  modified_base 19: mod_base = OTHER; note = 2'-O-methylguanosine-3'-phosphate
  modified_base 20: mod_base = OTHER; note = 2'-O-methyladenosine-3'-phosphate
  modified_base 21: mod_base = OTHER; note = 2'-O-methyladenosine-3'-phosphorothioate
  modified_base 22: mod_base = OTHER; note = 2'-O-methyluridine-3'-phosphorothioate
  modified_base 23: mod_base = OTHER; note = 2'-O-methyluridine-3'-phosphate
tcaggagatcagaatgctgaatt

SEQ ID NO: 269 - RNA, 23 nt, synthetic construct
  source 1..23: mol_type = other RNA
  modified_base 1: mod_base = OTHER; note = 2'-O-methylguanosine-3'-phosphorothioate
  modified_base 2: mod_base = OTHER; note = 2'-O-methylguanosine-3'-phosphorothioate
  modified_base 3: mod_base = OTHER; note = 2'-O-methyladenosine-3'-phosphate
  modified_base 4: mod_base = OTHER; note = 2'-O-methylguanosine-3'-phosphate
  modified_base 5: mod_base = OTHER; note = 2'-fluoroadenosine-3'-phosphate
  modified_base 6: mod_base = OTHER; note = 2'-O-methyluridine-3'-phosphate
  modified_base 7: mod_base = OTHER; note = 2'-fluorocytidine-3'-phosphate
  modified_base 8: mod_base = OTHER; note = 2'-fluoroadenosine-3'-phosphate
  modified_base 9: mod_base = OTHER; note = 2'-fluoroguanosine-3'-phosphate
  modified_base 10: mod_base = OTHER; note = 2'-O-methyladenosine-3'-phosphate
  modified_base 11: mod_base = OTHER; note = 2'-O-methyladenosine-3'-phosphate
  modified_base 12: mod_base = OTHER; note = 2'-O-methyluridine-3'-phosphate
  modified_base 13: mod_base = OTHER; note = 2'-O-methylguanosine-3'-phosphate
  modified_base 14: mod_base = OTHER; note = 2'-O-methylcytidine-3'-phosphate
  modified_base 15: mod_base = OTHER; note = 2'-O-methyluridine-3'-phosphate
  modified_base 16: mod_base = OTHER; note = 2'-O-methylguanosine-3'-phosphate
  modified_base 17: mod_base = OTHER; note = 2'-O-methyladenosine-3'-phosphate
  modified_base 18: mod_base = OTHER; note = 2'-O-methyladenosine-3'-phosphate
  modified_base 19: mod_base = OTHER; note = 2'-O-methylguanosine-3'-phosphate
  modified_base 20: mod_base = OTHER; note = 2'-O-methyladenosine-3'-phosphate
  modified_base 21: mod_base = OTHER; note = 2'-O-methyladenosine-3'-phosphorothioate
  modified_base 22: mod_base = OTHER; note = 2'-O-methyluridine-3'-phosphorothioate
  modified_base 23: mod_base = OTHER; note = 2'-O-methyluridine-3'-phosphate
ggagatcagaatgctgaagaatt

SEQ ID NO: 270 - RNA, 23 nt, synthetic construct
  source 1..23: mol_type = other RNA
  modified_base 1: mod_base = OTHER; note = 2'-O-methyluridine-3'-phosphorothioate
  modified_base 2: mod_base = OTHER; note = 2'-O-methylcytidine-3'-phosphorothioate
  modified_base 3: mod_base = OTHER; note = 2'-O-methyladenosine-3'-phosphate
  modified_base 4: mod_base = OTHER; note = 2'-O-methyluridine-3'-phosphate
  modified_base 5: mod_base = OTHER; note = 2'-fluoroguanosine-3'-phosphate
  modified_base 6: mod_base = OTHER; note = 2'-O-methylcytidine-3'-phosphate
  modified_base 7: mod_base = OTHER; note = 2'-fluoroadenosine-3'-phosphate
  modified_base 8: mod_base = OTHER; note = 2'-fluorocytidine-3'-phosphate
  modified_base 9: mod_base = OTHER; note = 2'-fluoroadenosine-3'-phosphate
  modified_base 10: mod_base = OTHER; note = 2'-O-methyluridine-3'-phosphate
  modified_base 11: mod_base = OTHER; note = 2'-O-methyladenosine-3'-phosphate
  modified_base 12: mod_base = OTHER; note = 2'-O-methylcytidine-3'-phosphate
  modified_base 13: mod_base = OTHER; note = 2'-O-methyladenosine-3'-phosphate
  modified_base 14: mod_base = OTHER; note = 2'-O-methyladenosine-3'-phosphate
  modified_base 15: mod_base = OTHER; note = 2'-O-methylcytidine-3'-phosphate
  modified_base 16: mod_base = OTHER; note = 2'-O-methyladenosine-3'-phosphate
  modified_base 17: mod_base = OTHER; note = 2'-O-methylcytidine-3'-phosphate
  modified_base 18: mod_base = OTHER; note = 2'-O-methyladenosine-3'-phosphate
  modified_base 19: mod_base = OTHER; note = 2'-O-methylguanosine-3'-phosphate
  modified_base 20: mod_base = OTHER; note = 2'-O-methyladenosine-3'-phosphate
  modified_base 21: mod_base = OTHER; note = 2'-O-methyladenosine-3'-phosphorothioate
  modified_base 22: mod_base = OTHER; note = 2'-O-methyluridine-3'-phosphorothioate
  modified_base 23: mod_base = OTHER; note = 2'-O-methyluridine-3'-phosphate
tcatgcacatacaacacagaatt

SEQ ID NO: 271 - RNA, 23 nt, synthetic construct
  source 1..23: mol_type = other RNA
  modified_base 1: mod_base = OTHER; note = 2'-O-methyluridine-3'-phosphorothioate
  modified_base 2: mod_base = OTHER; note = 2'-O-methylcytidine-3'-phosphorothioate
  modified_base 3: mod_base = OTHER; note = 2'-O-methylguanosine-3'-phosphate
  modified_base 4: mod_base = OTHER; note = 2'-O-methyluridine-3'-phosphate
  modified_base 5: mod_base = OTHER; note = 2'-fluoroguanosine-3'-phosphate
  modified_base 6: mod_base = OTHER; note = 2'-O-methylcytidine-3'-phosphate
  modified_base 7: mod_base = OTHER; note = 2'-fluoroadenosine-3'-phosphate
  modified_base 8: mod_base = OTHER; note = 2'-fluorocytidine-3'-phosphate
  modified_base 9: mod_base = OTHER; note = 2'-fluoroadenosine-3'-phosphate
  modified_base 10: mod_base = OTHER; note = 2'-O-methyluridine-3'-phosphate
  modified_base 11: mod_base = OTHER; note = 2'-O-methyladenosine-3'-phosphate
  modified_base 12: mod_base = OTHER; note = 2'-O-methylcytidine-3'-phosphate
  modified_base 13: mod_base = OTHER; note = 2'-O-methyladenosine-3'-phosphate
  modified_base 14: mod_base = OTHER; note = 2'-O-methyladenosine-3'-phosphate
  modified_base 15: mod_base = OTHER; note = 2'-O-methylcytidine-3'-phosphate
  modified_base 16: mod_base = OTHER; note = 2'-O-methyladenosine-3'-phosphate
  modified_base 17: mod_base = OTHER; note = 2'-O-methylcytidine-3'-phosphate
  modified_base 18: mod_base = OTHER; note = 2'-O-methyladenosine-3'-phosphate
  modified_base 19: mod_base = OTHER; note = 2'-O-methylguanosine-3'-phosphate
  modified_base 20: mod_base = OTHER; note = 2'-O-methyladenosine-3'-phosphate
  modified_base 21: mod_base = OTHER; note = 2'-O-methyladenosine-3'-phosphorothioate
  modified_base 22: mod_base = OTHER; note = 2'-O-methyluridine-3'-phosphorothioate
  modified_base 23: mod_base = OTHER; note = 2'-O-methyluridine-3'-phosphate
tcgtgcacatacaacacagaatt

SEQ ID NO: 272 - RNA, 23 nt, synthetic construct
  source 1..23: mol_type = other RNA
  modified_base 1: mod_base = OTHER; note = 2'-O-methyluridine-3'-phosphorothioate
  modified_base 2: mod_base = OTHER; note = 2'-O-methylcytidine-3'-phosphorothioate
  modified_base 3: mod_base = OTHER; note = 2'-O-methylcytidine-3'-phosphate
  modified_base 4: mod_base = OTHER; note = 2'-O-methyluridine-3'-phosphate
  modified_base 5: mod_base = OTHER; note = 2'-fluoroguanosine-3'-phosphate
  modified_base 6: mod_base = OTHER; note = 2'-O-methyluridine-3'-phosphate
  modified_base 7: mod_base = OTHER; note = 2'-fluoroadenosine-3'-phosphate
  modified_base 8: mod_base = OTHER; note = 2'-fluorocytidine-3'-phosphate
  modified_base 9: mod_base = OTHER; note = 2'-fluoroadenosine-3'-phosphate
  modified_base 10: mod_base = OTHER; note = 2'-O-methyluridine-3'-phosphate
  modified_base 11: mod_base = OTHER; note = 2'-O-methyladenosine-3'-phosphate
  modified_base 12: mod_base = OTHER; note = 2'-O-methylcytidine-3'-phosphate
  modified_base 13: mod_base = OTHER; note = 2'-O-methyladenosine-3'-phosphate
  modified_base 14: mod_base = OTHER; note = 2'-O-methyladenosine-3'-phosphate
  modified_base 15: mod_base = OTHER; note = 2'-O-methylcytidine-3'-phosphate
  modified_base 16: mod_base = OTHER; note = 2'-O-methyladenosine-3'-phosphate
  modified_base 17: mod_base = OTHER; note = 2'-O-methylcytidine-3'-phosphate
  modified_base 18: mod_base = OTHER; note = 2'-O-methyladenosine-3'-phosphate
  modified_base 19: mod_base = OTHER; note = 2'-O-methylguanosine-3'-phosphate
  modified_base 20: mod_base = OTHER; note = 2'-O-methyladenosine-3'-phosphate
  modified_base 21: mod_base = OTHER; note = 2'-O-methyladenosine-3'-phosphorothioate
  modified_base 22: mod_base = OTHER; note = 2'-O-methyluridine-3'-phosphorothioate
  modified_base 23: mod_base = OTHER; note = 2'-O-methyluridine-3'-phosphate
tcctgtacatacaacacagaatt

SEQ ID NO: 273 - RNA, 23 nt, synthetic construct
  source 1..23: mol_type = other RNA
  modified_base 1: mod_base = OTHER; note = 2'-O-methyluridine-3'-phosphorothioate
  modified_base 2: mod_base = OTHER; note = 2'-O-methylcytidine-3'-phosphorothioate
  modified_base 3: mod_base = OTHER; note = 2'-O-methylcytidine-3'-phosphate
  modified_base 4: mod_base = OTHER; note = 2'-O-methyluridine-3'-phosphate
  modified_base 5: mod_base = OTHER; note = 2'-fluoroguanosine-3'-phosphate
  modified_base 6: mod_base = OTHER; note = 2'-O-methylcytidine-3'-phosphate
  modified_base 7: mod_base = OTHER; note = 2'-fluoroadenosine-3'-phosphate
  modified_base 8: mod_base = OTHER; note = 2'-fluorocytidine-3'-phosphate
  modified_base 9: mod_base = OTHER; note = 2'-fluoroguanosine-3'-phosphate
  modified_base 10: mod_base = OTHER; note = 2'-O-methyluridine-3'-phosphate
  modified_base 11: mod_base = OTHER; note = 2'-O-methyladenosine-3'-phosphate
  modified_base 12: mod_base = OTHER; note = 2'-O-methylcytidine-3'-phosphate
  modified_base 13: mod_base = OTHER; note = 2'-O-methyladenosine-3'-phosphate
  modified_base 14: mod_base = OTHER; note = 2'-O-methyladenosine-3'-phosphate
  modified_base 15: mod_base = OTHER; note = 2'-O-methylcytidine-3'-phosphate
  modified_base 16: mod_base = OTHER; note = 2'-O-methyladenosine-3'-phosphate
  modified_base 17: mod_base = OTHER; note = 2'-O-methylcytidine-3'-phosphate
  modified_base 18: mod_base = OTHER; note = 2'-O-methylguanosine-3'-phosphate
  modified_base 19: mod_base = OTHER; note = 2'-O-methylguanosine-3'-phosphate
  modified_base 20: mod_base = OTHER; note = 2'-O-methyladenosine-3'-phosphate
  modified_base 21: mod_base = OTHER; note = 2'-O-methyladenosine-3'-phosphorothioate
  modified_base 22: mod_base = OTHER; note = 2'-O-methyluridine-3'-phosphorothioate
  modified_base 23: mod_base = OTHER; note = 2'-O-methyluridine-3'-phosphate
tcctgcacgtacaacacggaatt

SEQ ID NO: 274 - RNA, 23 nt, synthetic construct
  source 1..23: mol_type = other RNA
  modified_base 1: mod_base = OTHER; note = 2'-O-methyluridine-3'-phosphorothioate
  modified_base 2: mod_base = OTHER; note = 2'-O-methylcytidine-3'-phosphorothioate
  modified_base 3: mod_base = OTHER; note = 2'-O-methylcytidine-3'-phosphate
  modified_base 4: mod_base = OTHER; note = 2'-O-methyluridine-3'-phosphate
  modified_base 5: mod_base = OTHER; note = 2'-fluoroguanosine-3'-phosphate
  modified_base 6: mod_base = OTHER; note = 2'-O-methyluridine-3'-phosphate
  modified_base 7: mod_base = OTHER; note = 2'-fluoroadenosine-3'-phosphate
  modified_base 8: mod_base = OTHER; note = 2'-fluorocytidine-3'-phosphate
  modified_base 9: mod_base = OTHER; note = 2'-fluoroguanosine-3'-phosphate
  modified_base 10: mod_base = OTHER; note = 2'-O-methyluridine-3'-phosphate
  modified_base 11: mod_base = OTHER; note = 2'-O-methyladenosine-3'-phosphate
  modified_base 12: mod_base = OTHER; note = 2'-O-methylcytidine-3'-phosphate
  modified_base 13: mod_base = OTHER; note = 2'-O-methyladenosine-3'-phosphate
  modified_base 14: mod_base = OTHER; note = 2'-O-methyladenosine-3'-phosphate
  modified_base 15: mod_base = OTHER; note = 2'-O-methylcytidine-3'-phosphate
  modified_base 16: mod_base = OTHER; note = 2'-O-methyladenosine-3'-phosphate
  modified_base 17: mod_base = OTHER; note = 2'-O-methylcytidine-3'-phosphate
  modified_base 18: mod_base = OTHER; note = 2'-O-methyladenosine-3'-phosphate
  modified_base 19: mod_base = OTHER; note = 2'-O-methylguanosine-3'-phosphate
  modified_base 20: mod_base = OTHER; note = 2'-O-methyladenosine-3'-phosphate
  modified_base 21: mod_base = OTHER; note = 2'-O-methyladenosine-3'-phosphorothioate
  modified_base 22: mod_base = OTHER; note = 2'-O-methyluridine-3'-phosphorothioate
  modified_base 23: mod_base = OTHER; note = 2'-O-methyluridine-3'-phosphate
tcctgtacgtacaacacagaatt

SEQ ID NO: 275 - RNA, 23 nt, synthetic construct
  source 1..23: mol_type = other RNA
  modified_base 1: mod_base = OTHER; note = 2'-O-methyluridine-3'-phosphorothioate
  modified_base 2: mod_base = OTHER; note = 2'-O-methylcytidine-3'-phosphorothioate
  modified_base 3: mod_base = OTHER; note = 2'-O-methyluridine-3'-phosphate
  modified_base 4: mod_base = OTHER; note = 2'-O-methyluridine-3'-phosphate
  modified_base 5: mod_base = OTHER; note = 2'-fluoroguanosine-3'-phosphate
  modified_base 6: mod_base = OTHER; note = 2'-O-methylcytidine-3'-phosphate
  modified_base 7: mod_base = OTHER; note = 2'-fluoroadenosine-3'-phosphate
  modified_base 8: mod_base = OTHER; note = 2'-fluorocytidine-3'-phosphate
  modified_base 9: mod_base = OTHER; note = 2'-fluoroadenosine-3'-phosphate
  modified_base 10: mod_base = OTHER; note = 2'-O-methyluridine-3'-phosphate
  modified_base 11: mod_base = OTHER; note = 2'-O-methyladenosine-3'-phosphate
  modified_base 12: mod_base = OTHER; note = 2'-O-methylcytidine-3'-phosphate
  modified_base 13: mod_base = OTHER; note = 2'-O-methyladenosine-3'-phosphate
  modified_base 14: mod_base = OTHER; note = 2'-O-methyladenosine-3'-phosphate
  modified_base 15: mod_base = OTHER; note = 2'-O-methylcytidine-3'-phosphate
  modified_base 16: mod_base = OTHER; note = 2'-O-methyladenosine-3'-phosphate
  modified_base 17: mod_base = OTHER; note = 2'-O-methylcytidine-3'-phosphate
  modified_base 18: mod_base = OTHER; note = 2'-O-methylguanosine-3'-phosphate
  modified_base 19: mod_base = OTHER; note = 2'-O-methylguanosine-3'-phosphate
  modified_base 20: mod_base = OTHER; note = 2'-O-methyladenosine-3'-phosphate
  modified_base 21: mod_base = OTHER; note = 2'-O-methyladenosine-3'-phosphorothioate
  modified_base 22: mod_base = OTHER; note = 2'-O-methyluridine-3'-phosphorothioate
  modified_base 23: mod_base = OTHER; note = 2'-O-methyluridine-3'-phosphate
tcttgcacatacaacacggaatt

SEQ ID NO: 276 - RNA, 23 nt, synthetic construct
  source 1..23: mol_type = other RNA
  modified_base 1: mod_base = OTHER; note = 2'-O-methylcytidine-3'-phosphorothioate
  modified_base 2: mod_base = OTHER; note = 2'-O-methylcytidine-3'-phosphorothioate
  modified_base 3: mod_base = OTHER; note = 2'-O-methylguanosine-3'-phosphate
  modified_base 4: mod_base = OTHER; note = 2'-O-methylcytidine-3'-phosphate
  modified_base 5: mod_base = OTHER; note = 2'-fluorouridine-3'-phosphate
  modified_base 6: mod_base = OTHER; note = 2'-O-methyluridine-3'-phosphate
  modified_base 7: mod_base = OTHER; note = 2'-fluorocytidine-3'-phosphate
  modified_base 8: mod_base = OTHER; note = 2'-fluorocytidine-3'-phosphate
  modified_base 9: mod_base = OTHER; note = 2'-fluorocytidine-3'-phosphate
  modified_base 10: mod_base = OTHER; note = 2'-O-methylguanosine-3'-phosphate
  modified_base 11: mod_base = OTHER; note = 2'-O-methylguanosine-3'-phosphate
  modified_base 12: mod_base = OTHER; note = 2'-O-methylguanosine-3'-phosphate
  modified_base 13: mod_base = OTHER; note = 2'-O-methyluridine-3'-phosphate
  modified_base 14: mod_base = OTHER; note = 2'-O-methylguanosine-3'-phosphate
  modified_base 15: mod_base = OTHER; note = 2'-O-methyladenosine-3'-phosphate
  modified_base 16: mod_base = OTHER; note = 2'-O-methylguanosine-3'-phosphate
  modified_base 17: mod_base = OTHER; note = 2'-O-methyluridine-3'-phosphate
  modified_base 18: mod_base = OTHER; note = 2'-O-methylguanosine-3'-phosphate
  modified_base 19: mod_base = OTHER; note = 2'-O-methylguanosine-3'-phosphate
  modified_base 20: mod_base = OTHER; note = 2'-O-methyladenosine-3'-phosphate
  modified_base 21: mod_base = OTHER; note = 2'-O-methyladenosine-3'-phosphorothioate
  modified_base 22: mod_base = OTHER; note = 2'-O-methyluridine-3'-phosphorothioate
  modified_base 23: mod_base = OTHER; note = 2'-O-methyluridine-3'-phosphate
ccgcttcccgggtgagtggaatt

SEQ ID NO: 277 - RNA, 23 nt, synthetic construct
  source 1..23: mol_type = other RNA
  modified_base 1: mod_base = OTHER; note = 2'-O-methylcytidine-3'-phosphorothioate
  modified_base 2: mod_base = OTHER; note = 2'-O-methylcytidine-3'-phosphorothioate
  modified_base 3: mod_base = OTHER; note = 2'-O-methylguanosine-3'-phosphate
  modified_base 4: mod_base = OTHER; note = 2'-O-methylcytidine-3'-phosphate
  modified_base 5: mod_base = OTHER; note = 2'-fluorouridine-3'-phosphate
  modified_base 6: mod_base = OTHER; note = 2'-O-methyluridine-3'-phosphate
  modified_base 7: mod_base = OTHER; note = 2'-fluorocytidine-3'-phosphate
  modified_base 8: mod_base = OTHER; note = 2'-fluorocytidine-3'-phosphate
  modified_base 9: mod_base = OTHER; note = 2'-fluorocytidine-3'-phosphate
  modified_base 10: mod_base = OTHER; note = 2'-O-methylguanosine-3'-phosphate
  modified_base 11: mod_base = OTHER; note = 2'-O-methylguanosine-3'-phosphate
  modified_base 12: mod_base = OTHER; note = 2'-O-methylguanosine-3'-phosphate
  modified_base 13: mod_base = OTHER; note = 2'-O-methyluridine-3'-phosphate
  modified_base 14: mod_base = OTHER; note = 2'-O-methyladenosine-3'-phosphate
  modified_base 15: mod_base = OTHER; note = 2'-O-methyladenosine-3'-phosphate
  modified_base 16: mod_base = OTHER; note = 2'-O-methylcytidine-3'-phosphate
  modified_base 17: mod_base = OTHER; note = 2'-O-methyluridine-3'-phosphate
  modified_base 18: mod_base = OTHER; note = 2'-O-methylguanosine-3'-phosphate
  modified_base 19: mod_base = OTHER; note = 2'-O-methylguanosine-3'-phosphate
  modified_base 20: mod_base = OTHER; note = 2'-O-methyladenosine-3'-phosphate
  modified_base 21: mod_base = OTHER; note = 2'-O-methyladenosine-3'-phosphorothioate
  modified_base 22: mod_base = OTHER; note = 2'-O-methyluridine-3'-phosphorothioate
  modified_base 23: mod_base = OTHER; note = 2'-O-methyluridine-3'-phosphate
ccgcttcccgggtaactggaatt

SEQ ID NO: 278 - RNA, 23 nt, synthetic construct
  source 1..23: mol_type = other RNA
  modified_base 1: mod_base = OTHER; note = 2'-O-methylcytidine-3'-phosphorothioate
  modified_base 2: mod_base = OTHER; note = 2'-O-methylcytidine-3'-phosphorothioate
  modified_base 3: mod_base = OTHER; note = 2'-O-methylguanosine-3'-phosphate
  modified_base 4: mod_base = OTHER; note = 2'-O-methylcytidine-3'-phosphate
  modified_base 5: mod_base = OTHER; note = 2'-fluorouridine-3'-phosphate
  modified_base 6: mod_base = OTHER; note = 2'-O-methyluridine-3'-phosphate
  modified_base 7: mod_base = OTHER; note = 2'-fluorocytidine-3'-phosphate
  modified_base 8: mod_base = OTHER; note = 2'-fluorocytidine-3'-phosphate
  modified_base 9: mod_base = OTHER; note = 2'-fluorocytidine-3'-phosphate
  modified_base 10: mod_base = OTHER; note = 2'-O-methylguanosine-3'-phosphate
  modified_base 11: mod_base = OTHER; note = 2'-O-methylguanosine-3'-phosphate
  modified_base 12: mod_base = OTHER; note = 2'-O-methylguanosine-3'-phosphate
  modified_base 13: mod_base = OTHER; note = 2'-O-methyluridine-3'-phosphate
  modified_base 14: mod_base = OTHER; note = 2'-O-methyladenosine-3'-phosphate
  modified_base 15: mod_base = OTHER; note = 2'-O-methyladenosine-3'-phosphate
  modified_base 16: mod_base = OTHER; note = 2'-O-methyladenosine-3'-phosphate
  modified_base 17: mod_base = OTHER; note = 2'-O-methyluridine-3'-phosphate
  modified_base 18: mod_base = OTHER; note = 2'-O-methylguanosine-3'-phosphate
  modified_base 19: mod_base = OTHER; note = 2'-O-methylguanosine-3'-phosphate
  modified_base 20: mod_base = OTHER; note = 2'-O-methylguanosine-3'-phosphate
  modified_base 21: mod_base = OTHER; note = 2'-O-methyladenosine-3'-phosphorothioate
  modified_base 22: mod_base = OTHER; note = 2'-O-methyluridine-3'-phosphorothioate
  modified_base 23: mod_base = OTHER; note = 2'-O-methyluridine-3'-phosphate
ccgcttcccgggtaaatgggatt

SEQ ID NO: 279 - RNA, 23 nt, synthetic construct
  source 1..23: mol_type = other RNA
  modified_base 1: mod_base = OTHER; note = 2'-O-methylguanosine-3'-phosphorothioate
  modified_base 2: mod_base = OTHER; note = 2'-O-methylcytidine-3'-phosphorothioate
  modified_base 3: mod_base = OTHER; note = 2'-O-methylguanosine-3'-phosphate
  modified_base 4: mod_base = OTHER; note = 2'-O-methyladenosine-3'-phosphate
  modified_base 5: mod_base = OTHER; note = 2'-fluorouridine-3'-phosphate
  modified_base 6: mod_base = OTHER; note = 2'-O-methyluridine-3'-phosphate
  modified_base 7: mod_base = OTHER; note = 2'-fluorocytidine-3'-phosphate
  modified_base 8: mod_base = OTHER; note = 2'-fluorocytidine-3'-phosphate
  modified_base 9: mod_base = OTHER; note = 2'-fluoroadenosine-3'-phosphate
  modified_base 10: mod_base = OTHER; note = 2'-O-methylguanosine-3'-phosphate
  modified_base 11: mod_base = OTHER; note = 2'-O-methylguanosine-3'-phosphate
  modified_base 12: mod_base = OTHER; note = 2'-O-methylguanosine-3'-phosphate
  modified_base 13: mod_base = OTHER; note = 2'-O-methyluridine-3'-phosphate
  modified_base 14: mod_base = OTHER; note = 2'-O-methylguanosine-3'-phosphate
  modified_base 15: mod_base = OTHER; note = 2'-O-methyladenosine-3'-phosphate
  modified_base 16: mod_base = OTHER; note = 2'-O-methyladenosine-3'-phosphate
  modified_base 17: mod_base = OTHER; note = 2'-O-methyluridine-3'-phosphate
  modified_base 18: mod_base = OTHER; note = 2'-O-methylguanosine-3'-phosphate
  modified_base 19: mod_base = OTHER; note = 2'-O-methylguanosine-3'-phosphate
  modified_base 20: mod_base = OTHER; note = 2'-O-methyladenosine-3'-phosphate
  modified_base 21: mod_base = OTHER; note = 2'-O-methyladenosine-3'-phosphorothioate
  modified_base 22: mod_base = OTHER; note = 2'-O-methyluridine-3'-phosphorothioate
  modified_base 23: mod_base = OTHER; note = 2'-O-methyluridine-3'-phosphate
gcgattccagggtgaatggaatt

SEQ ID NO: 280 - RNA, 23 nt, synthetic construct
  source 1..23: mol_type = other RNA
  modified_base 1: mod_base = OTHER; note = 2'-O-methylcytidine-3'-phosphorothioate
  modified_base 2: mod_base = OTHER; note = 2'-O-methylcytidine-3'-phosphorothioate
  modified_base 3: mod_base = OTHER; note = 2'-O-methylguanosine-3'-phosphate
  modified_base 4: mod_base = OTHER; note = 2'-O-methylcytidine-3'-phosphate
  modified_base 5: mod_base = OTHER; note = 2'-fluorouridine-3'-phosphate
  modified_base 6: mod_base = OTHER; note = 2'-O-methyluridine-3'-phosphate
  modified_base 7: mod_base = OTHER; note = 2'-fluorocytidine-3'-phosphate
  modified_base 8: mod_base = OTHER; note = 2'-fluorocytidine-3'-phosphate
  modified_base 9: mod_base = OTHER; note = 2'-fluorocytidine-3'-phosphate
  modified_base 10: mod_base = OTHER; note = 2'-O-methylguanosine-3'-phosphate
  modified_base 11: mod_base = OTHER; note = 2'-O-methylguanosine-3'-phosphate
  modified_base 12: mod_base = OTHER; note = 2'-O-methylguanosine-3'-phosphate
  modified_base 13: mod_base = OTHER; note = 2'-O-methyluridine-3'-phosphate
  modified_base 14: mod_base = OTHER; note = 2'-O-methylguanosine-3'-phosphate
  modified_base 15: mod_base = OTHER; note = 2'-O-methyladenosine-3'-phosphate
  modified_base 16: mod_base = OTHER; note = 2'-O-methyladenosine-3'-phosphate
  modified_base 17: mod_base = OTHER; note = 2'-O-methyluridine-3'-phosphate
  modified_base 18: mod_base = OTHER; note = 2'-O-methylguanosine-3'-phosphate
  modified_base 19: mod_base = OTHER; note = 2'-O-methylguanosine-3'-phosphate
  modified_base 20: mod_base = OTHER; note = 2'-O-methyladenosine-3'-phosphate
  modified_base 21: mod_base = OTHER; note = 2'-O-methyladenosine-3'-phosphorothioate
  modified_base 22: mod_base = OTHER; note = 2'-O-methyluridine-3'-phosphorothioate
  modified_base 23: mod_base = OTHER; note = 2'-O-methyluridine-3'-phosphate
ccgcttcccgggtgaatggaatt

SEQ ID NO: 281 - RNA, 23 nt, synthetic construct
  source 1..23: mol_type = other RNA
  modified_base 1: mod_base = OTHER; note = 2'-O-methylcytidine-3'-phosphorothioate
  modified_base 2: mod_base = OTHER; note = 2'-O-methylcytidine-3'-phosphorothioate
  modified_base 3: mod_base = OTHER; note = 2'-O-methylguanosine-3'-phosphate
  modified_base 4: mod_base = OTHER; note = 2'-O-methylcytidine-3'-phosphate
  modified_base 5: mod_base = OTHER; note = 2'-fluorouridine-3'-phosphate
  modified_base 6: mod_base = OTHER; note = 2'-O-methyluridine-3'-phosphate
  modified_base 7: mod_base = OTHER; note = 2'-fluorocytidine-3'-phosphate
  modified_base 8: mod_base = OTHER; note = 2'-fluorocytidine-3'-phosphate
  modified_base 9: mod_base = OTHER; note = 2'-fluoroadenosine-3'-phosphate
  modified_base 10: mod_base = OTHER; note = 2'-O-methylguanosine-3'-phosphate
  modified_base 11: mod_base = OTHER; note = 2'-O-methylguanosine-3'-phosphate
  modified_base 12: mod_base = OTHER; note = 2'-O-methylguanosine-3'-phosphate
  modified_base 13: mod_base = OTHER; note = 2'-O-methylcytidine-3'-phosphate
  modified_base 14: mod_base = OTHER; note = 2'-O-methylguanosine-3'-phosphate
  modified_base 15: mod_base = OTHER; note = 2'-O-methyladenosine-3'-phosphate
  modified_base 16: mod_base = OTHER; note = 2'-O-methylguanosine-3'-phosphate
  modified_base 17: mod_base = OTHER; note = 2'-O-methyluridine-3'-phosphate
  modified_base 18: mod_base = OTHER; note = 2'-O-methylguanosine-3'-phosphate
  modified_base 19: mod_base = OTHER; note = 2'-O-methylguanosine-3'-phosphate
  modified_base 20: mod_base = OTHER; note = 2'-O-methyladenosine-3'-phosphate
  modified_base 21: mod_base = OTHER; note = 2'-O-methyladenosine-3'-phosphorothioate
  modified_base 22: mod_base = OTHER; note = 2'-O-methyluridine-3'-phosphorothioate
  modified_base 23: mod_base = OTHER; note = 2'-O-methyluridine-3'-phosphate
ccgcttccagggcgagtggaatt

SEQ ID NO: 282 - RNA, 23 nt, synthetic construct
  source 1..23: mol_type = other RNA
  modified_base 1: mod_base = OTHER; note = 2'-O-methyluridine-3'-phosphorothioate
  modified_base 2: mod_base = OTHER; note = 2'-fluorouridine-3'-phosphorothioate
  modified_base 3: mod_base = OTHER; note = 2'-O-methylcytidine-3'-phosphate
  modified_base 4: mod_base = OTHER; note = 2'-fluoroadenosine-3'-phosphate
  modified_base 5: mod_base = OTHER; note = 2'-O-methylguanosine-3'-phosphate
  modified_base 6: mod_base = OTHER; note = 2'-fluorocytidine-3'-phosphate
  modified_base 7: mod_base = OTHER; note = 2'-O-methyladenosine-3'-phosphate
  modified_base 8: mod_base = OTHER; note = 2'-fluorouridine-3'-phosphate
  modified_base 9: mod_base = OTHER; note = 2'-O-methyluridine-3'-phosphate
  modified_base 10: mod_base = OTHER; note = 2'-fluorocytidine-3'-phosphate
  modified_base 11: mod_base = OTHER; note = 2'-O-methyluridine-3'-phosphate
  modified_base 12: mod_base = OTHER; note = 2'-fluoroguanosine-3'-phosphate
  modified_base 13: mod_base = OTHER; note = 2'-O-methyladenosine-3'-phosphate
  modified_base 14: mod_base = OTHER; note = 2'-fluorouridine-3'-phosphate
  modified_base 15: mod_base = OTHER; note = 2'-O-methylcytidine-3'-phosphate
  modified_base 16: mod_base = OTHER; note = 2'-fluorouridine-3'-phosphate
  modified_base 17: mod_base = OTHER; note = 2'-O-methylcytidine-3'-phosphate
  modified_base 18: mod_base = OTHER; note = 2'-fluorocytidine-3'-phosphate
  modified_base 19: mod_base = OTHER; note = 2'-O-methyluridine-3'-phosphate
  modified_base 20: mod_base = OTHER; note = 2'-fluoroguanosine-3'-phosphate
  modified_base 21: mod_base = OTHER; note = 2'-O-methylguanosine-3'-phosphorothioate
  modified_base 22: mod_base = OTHER; note = 2'-deoxythymidine-3'-phosphate
  modified_base 23: mod_base = OTHER; note = 2'-deoxythymidine-3'-phosphate
ttcagcattctgatctcctggtt

SEQ ID NO: 283 - RNA, 23 nt, synthetic construct
  source 1..23: mol_type = other RNA
  modified_base 1: mod_base = OTHER; note = 2'-O-methyluridine-3'-phosphorothioate
  modified_base 2: mod_base = OTHER; note = 2'-fluorouridine-3'-phosphorothioate
  modified_base 3: mod_base = OTHER; note = 2'-O-methylcytidine-3'-phosphate
  modified_base 4: mod_base = OTHER; note = 2'-fluoroadenosine-3'-phosphate
  modified_base 5: mod_base = OTHER; note = 2'-O-methylguanosine-3'-phosphate
  modified_base 6: mod_base = OTHER; note = 2'-fluorocytidine-3'-phosphate
  modified_base 7: mod_base = OTHER; note = 2'-O-methyladenosine-3'-phosphate
  modified_base 8: mod_base = OTHER; note = 2'-fluorouridine-3'-phosphate
  modified_base 9: mod_base = OTHER; note = 2'-O-methyluridine-3'-phosphate
  modified_base 10: mod_base = OTHER; note = 2'-fluorocytidine-3'-phosphate
  modified_base 11: mod_base = OTHER; note = 2'-O-methyluridine-3'-phosphate
  modified_base 12: mod_base = OTHER; note = 2'-fluoroguanosine-3'-phosphate
  modified_base 13: mod_base = OTHER; note = 2'-O-methyladenosine-3'-phosphate
  modified_base 14: mod_base = OTHER; note = 2'-fluorouridine-3'-phosphate
  modified_base 15: mod_base = OTHER; note = 2'-O-methylcytidine-3'-phosphate
  modified_base 16: mod_base = OTHER; note = 2'-fluorouridine-3'-phosphate
  modified_base 17: mod_base = OTHER; note = 2'-O-methylcytidine-3'-phosphate
  modified_base 18: mod_base = OTHER; note = 2'-fluorocytidine-3'-phosphate
  modified_base 19: mod_base = OTHER; note = 2'-O-methyluridine-3'-phosphate
  modified_base 20: mod_base = OTHER; note = 2'-fluoroguanosine-3'-phosphate
  modified_base 21: mod_base = OTHER; note = 2'-O-methyladenosine-3'-phosphorothioate
  modified_base 22: mod_base = OTHER; note = 2'-deoxythymidine-3'-phosphate
  modified_base 23: mod_base = OTHER; note = 2'-deoxythymidine-3'-phosphate
ttcagcattctgatctcctgatt

SEQ ID NO: 284 - RNA, 23 nt, synthetic construct
  source 1..23: mol_type = other RNA
  modified_base 1: mod_base = OTHER; note = 2'-O-methyluridine-3'-phosphorothioate
  modified_base 2: mod_base = OTHER; note = 2'-fluorouridine-3'-phosphorothioate
  modified_base 3: mod_base = OTHER; note = 2'-O-methylcytidine-3'-phosphate
  modified_base 4: mod_base = OTHER; note = 2'-fluorouridine-3'-phosphate
  modified_base 5: mod_base = OTHER; note = 2'-O-methyluridine-3'-phosphate
  modified_base 6: mod_base = OTHER; note = 2'-fluorocytidine-3'-phosphate
  modified_base 7: mod_base = OTHER; note = 2'-O-methyladenosine-3'-phosphate
  modified_base 8: mod_base = OTHER; note = 2'-fluoroguanosine-3'-phosphate
  modified_base 9: mod_base = OTHER; note = 2'-O-methylcytidine-3'-phosphate
  modified_base 10: mod_base = OTHER; note = 2'-fluoroadenosine-3'-phosphate
  modified_base 11: mod_base = OTHER; note = 2'-O-methyluridine-3'-phosphate
  modified_base 12: mod_base = OTHER; note = 2'-fluorouridine-3'-phosphate
  modified_base 13: mod_base = OTHER; note = 2'-O-methylcytidine-3'-phosphate
  modified_base 14: mod_base = OTHER; note = 2'-fluorouridine-3'-phosphate
  modified_base 15: mod_base = OTHER; note = 2'-O-methylguanosine-3'-phosphate
  modified_base 16: mod_base = OTHER; note = 2'-fluoroadenosine-3'-phosphate
  modified_base 17: mod_base = OTHER; note = 2'-O-methyluridine-3'-phosphate
  modified_base 18: mod_base = OTHER; note = 2'-fluorocytidine-3'-phosphate
  modified_base 19: mod_base = OTHER; note = 2'-O-methyluridine-3'-phosphate
  modified_base 20: mod_base = OTHER; note = 2'-fluorocytidine-3'-phosphate
  modified_base 21: mod_base = OTHER; note = 2'-O-methylcytidine-3'-phosphorothioate
  modified_base 22: mod_base = OTHER; note = 2'-deoxythymidine-3'-phosphate
  modified_base 23: mod_base = OTHER; note = 2'-deoxythymidine-3'-phosphate
ttcttcagcattctgatctcctt

SEQ ID NO: 285 - RNA, 23 nt, synthetic construct
  source 1..23: mol_type = other RNA
  modified_base 1: mod_base = OTHER; note = 2'-O-methyluridine-3'-phosphorothioate
  modified_base 2: mod_base = OTHER; note = 2'-fluorouridine-3'-phosphorothioate
  modified_base 3: mod_base = OTHER; note = 2'-O-methylcytidine-3'-phosphate
  modified_base 4: mod_base = OTHER; note = 2'-fluorouridine-3'-phosphate
  modified_base 5: mod_base = OTHER; note = 2'-O-methylguanosine-3'-phosphate
  modified_base 6: mod_base = OTHER; note = 2'-fluorouridine-3'-phosphate
  modified_base 7: mod_base = OTHER; note = 2'-O-methylguanosine-3'-phosphate
  modified_base 8: mod_base = OTHER; note = 2'-fluorouridine-3'-phosphate
  modified_base 9: mod_base = OTHER; note = 2'-O-methyluridine-3'-phosphate
  modified_base 10: mod_base = OTHER; note = 2'-fluoroguanosine-3'-phosphate
  modified_base 11: mod_base = OTHER; note = 2'-O-methyluridine-3'-phosphate
  modified_base 12: mod_base = OTHER; note = 2'-fluoroadenosine-3'-phosphate
  modified_base 13: mod_base = OTHER; note = 2'-O-methyluridine-3'-phosphate
  modified_base 14: mod_base = OTHER; note = 2'-fluoroguanosine-3'-phosphate
  modified_base 15: mod_base = OTHER; note = 2'-O-methyluridine-3'-phosphate
  modified_base 16: mod_base = OTHER; note = 2'-fluoroguanosine-3'-phosphate
  modified_base 17: mod_base = OTHER; note = 2'-O-methylcytidine-3'-phosphate
  modified_base 18: mod_base = OTHER; note = 2'-fluoroadenosine-3'-phosphate
  modified_base 19: mod_base = OTHER; note = 2'-O-methyluridine-3'-phosphate
  modified_base 20: mod_base = OTHER; note = 2'-fluoroguanosine-3'-phosphate
  modified_base 21: mod_base = OTHER; note = 2'-O-methyladenosine-3'-phosphorothioate
  modified_base 22: mod_base = OTHER; note = 2'-deoxythymidine-3'-phosphate
  modified_base 23: mod_base = OTHER; note = 2'-deoxythymidine-3'-phosphate
ttctgtgttgtatgtgcatgatt

SEQ ID NO: 286 - RNA, 23 nt, synthetic construct
  source 1..23: mol_type = other RNA
  modified_base 1: mod_base = OTHER; note = 2'-O-methyluridine-3'-phosphorothioate
  modified_base 2: mod_base = OTHER; note = 2'-fluorouridine-3'-phosphorothioate
  modified_base 3: mod_base = OTHER; note = 2'-O-methylcytidine-3'-phosphate
  modified_base 4: mod_base = OTHER; note = 2'-fluorouridine-3'-phosphate
  modified_base 5: mod_base = OTHER; note = 2'-O-methylguanosine-3'-phosphate
  modified_base 6: mod_base = OTHER; note = 2'-fluorouridine-3'-phosphate
  modified_base 7: mod_base = OTHER; note = 2'-O-methylguanosine-3'-phosphate
  modified_base 8: mod_base = OTHER; note = 2'-fluorouridine-3'-phosphate
  modified_base 9: mod_base = OTHER; note = 2'-O-methyluridine-3'-phosphate
  modified_base 10: mod_base = OTHER; note = 2'-fluoroguanosine-3'-phosphate
  modified_base 11: mod_base = OTHER; note = 2'-O-methyluridine-3'-phosphate
  modified_base 12: mod_base = OTHER; note = 2'-fluoroadenosine-3'-phosphate
  modified_base 13: mod_base = OTHER; note = 2'-O-methyluridine-3'-phosphate
  modified_base 14: mod_base = OTHER; note = 2'-fluoroguanosine-3'-phosphate
  modified_base 15: mod_base = OTHER; note = 2'-O-methyluridine-3'-phosphate
  modified_base 16: mod_base = OTHER; note = 2'-fluoroguanosine-3'-phosphate
  modified_base 17: mod_base = OTHER; note = 2'-O-methylcytidine-3'-phosphate
  modified_base 18: mod_base = OTHER; note = 2'-fluoroadenosine-3'-phosphate
  modified_base 19: mod_base = OTHER; note = 2'-O-methylcytidine-3'-phosphate
  modified_base 20: mod_base = OTHER; note = 2'-fluoroguanosine-3'-phosphate
  modified_base 21: mod_base = OTHER; note = 2'-O-methyladenosine-3'-phosphorothioate
  modified_base 22: mod_base = OTHER; note = 2'-deoxythymidine-3'-phosphate
  modified_base 23: mod_base = OTHER; note = 2'-deoxythymidine-3'-phosphate
ttctgtgttgtatgtgcacgatt

SEQ ID NO: 287 - RNA, 23 nt, synthetic construct
  source 1..23: mol_type = other RNA
  modified_base 1: mod_base = OTHER; note = 2'-O-methyluridine-3'-phosphorothioate
  modified_base 2: mod_base = OTHER; note = 2'-fluorouridine-3'-phosphorothioate
  modified_base 3: mod_base = OTHER; note = 2'-O-methylcytidine-3'-phosphate
  modified_base 4: mod_base = OTHER; note = 2'-fluorouridine-3'-phosphate
  modified_base 5: mod_base = OTHER; note = 2'-O-methylguanosine-3'-phosphate
  modified_base 6: mod_base = OTHER; note = 2'-fluorouridine-3'-phosphate
  modified_base 7: mod_base = OTHER; note = 2'-O-methylguanosine-3'-phosphate
  modified_base 8: mod_base = OTHER; note = 2'-fluorouridine-3'-phosphate
  modified_base 9: mod_base = OTHER; note = 2'-O-methyluridine-3'-phosphate
  modified_base 10: mod_base = OTHER; note = 2'-fluoroguanosine-3'-phosphate
  modified_base 11: mod_base = OTHER; note = 2'-O-methyluridine-3'-phosphate
  modified_base 12: mod_base = OTHER; note = 2'-fluoroadenosine-3'-phosphate
  modified_base 13: mod_base = OTHER; note = 2'-O-methyluridine-3'-phosphate
  modified_base 14: mod_base = OTHER; note = 2'-fluoroguanosine-3'-phosphate
  modified_base 15: mod_base = OTHER; note = 2'-O-methyluridine-3'-phosphate
  modified_base 16: mod_base = OTHER; note = 2'-fluoroadenosine-3'-phosphate
  modified_base 17: mod_base = OTHER; note = 2'-O-methylcytidine-3'-phosphate
  modified_base 18: mod_base = OTHER; note = 2'-fluoroadenosine-3'-phosphate
  modified_base 19: mod_base = OTHER; note = 2'-O-methylguanosine-3'-phosphate
  modified_base 20: mod_base = OTHER; note = 2'-fluoroguanosine-3'-phosphate
  modified_base 21: mod_base = OTHER; note = 2'-O-methyladenosine-3'-phosphorothioate
  modified_base 22: mod_base = OTHER; note = 2'-deoxythymidine-3'-phosphate
  modified_base 23: mod_base = OTHER; note = 2'-deoxythymidine-3'-phosphate
ttctgtgttgtatgtacaggatt

SEQ ID NO: 288 - RNA, 23 nt, synthetic construct
  source 1..23: mol_type = other RNA
  modified_base 1: mod_base = OTHER; note = 2'-O-methyluridine-3'-phosphorothioate
  modified_base 2: mod_base = OTHER; note = 2'-fluorouridine-3'-phosphorothioate
  modified_base 3: mod_base = OTHER; note = 2'-O-methylcytidine-3'-phosphate
  modified_base 4: mod_base = OTHER; note = 2'-fluorocytidine-3'-phosphate
  modified_base 5: mod_base = OTHER; note = 2'-O-methylguanosine-3'-phosphate
  modified_base 6: mod_base = OTHER; note = 2'-fluorouridine-3'-phosphate
  modified_base 7: mod_base = OTHER; note = 2'-O-methylguanosine-3'-phosphate
  modified_base 8: mod_base = OTHER; note = 2'-fluorouridine-3'-phosphate
  modified_base 9: mod_base = OTHER; note = 2'-O-methyluridine-3'-phosphate
  modified_base 10: mod_base = OTHER; note = 2'-fluoroguanosine-3'-phosphate
  modified_base 11: mod_base = OTHER; note = 2'-O-methyluridine-3'-phosphate
  modified_base 12: mod_base = OTHER; note = 2'-fluoroadenosine-3'-phosphate
  modified_base 13: mod_base = OTHER; note = 2'-O-methylcytidine-3'-phosphate
  modified_base 14: mod_base = OTHER; note = 2'-fluoroguanosine-3'-phosphate
  modified_base 15: mod_base = OTHER; note = 2'-O-methyluridine-3'-phosphate
  modified_base 16: mod_base = OTHER; note = 2'-fluoroguanosine-3'-phosphate
  modified_base 17: mod_base = OTHER; note = 2'-O-methylcytidine-3'-phosphate
  modified_base 18: mod_base = OTHER; note = 2'-fluoroadenosine-3'-phosphate
  modified_base 19: mod_base = OTHER; note = 2'-O-methylguanosine-3'-phosphate
  modified_base 20: mod_base = OTHER; note = 2'-fluoroguanosine-3'-phosphate
  modified_base 21: mod_base = OTHER; note = 2'-O-methyladenosine-3'-phosphorothioate
  modified_base 22: mod_base = OTHER; note = 2'-deoxythymidine-3'-phosphate
  modified_base 23: mod_base = OTHER; note = 2'-deoxythymidine-3'-phosphate
ttccgtgttgtacgtgcaggatt

SEQ ID NO: 289 - RNA, 23 nt, synthetic construct
  source 1..23: mol_type = other RNA
  modified_base 1: mod_base = OTHER; note = 2'-O-methyluridine-3'-phosphorothioate
  modified_base 2: mod_base = OTHER; note = 2'-fluorouridine-3'-phosphorothioate
  modified_base 3: mod_base = OTHER; note = 2'-O-methylcytidine-3'-phosphate
  modified_base 4: mod_base = OTHER; note = 2'-fluorouridine-3'-phosphate
  modified_base 5: mod_base = OTHER; note = 2'-O-methylguanosine-3'-phosphate
  modified_base 6: mod_base = OTHER; note = 2'-fluorouridine-3'-phosphate
  modified_base 7: mod_base = OTHER; note = 2'-O-methylguanosine-3'-phosphate
  modified_base 8: mod_base = OTHER; note = 2'-fluorouridine-3'-phosphate
  modified_base 9: mod_base = OTHER; note = 2'-O-methyluridine-3'-phosphate
  modified_base 10: mod_base = OTHER; note = 2'-fluoroguanosine-3'-phosphate
  modified_base 11: mod_base = OTHER; note = 2'-O-methyluridine-3'-phosphate
  modified_base 12: mod_base = OTHER; note = 2'-fluoroadenosine-3'-phosphate
  modified_base 13: mod_base = OTHER; note = 2'-O-methylcytidine-3'-phosphate
  modified_base 14: mod_base = OTHER; note = 2'-fluoroguanosine-3'-phosphate
  modified_base 15: mod_base = OTHER; note = 2'-O-methyluridine-3'-phosphate
  modified_base 16: mod_base = OTHER; note = 2'-fluoroadenosine-3'-phosphate
  modified_base 17: mod_base = OTHER; note = 2'-O-methylcytidine-3'-phosphate
  modified_base 18: mod_base = OTHER; note = 2'-fluoroadenosine-3'-phosphate
  modified_base 19: mod_base = OTHER; note = 2'-O-methylguanosine-3'-phosphate
  modified_base 20: mod_base = OTHER; note = 2'-fluoroguanosine-3'-phosphate
  modified_base 21: mod_base = OTHER; note = 2'-O-methyladenosine-3'-phosphorothioate
  modified_base 22: mod_base = OTHER; note = 2'-deoxythymidine-3'-phosphate
  modified_base 23: mod_base = OTHER; note = 2'-deoxythymidine-3'-phosphate
ttctgtgttgtacgtacaggatt

SEQ ID NO: 290 - RNA, 23 nt, synthetic construct
  source 1..23: mol_type = other RNA
  modified_base 1: mod_base = OTHER; note = 2'-O-methyluridine-3'-phosphorothioate
  modified_base 2: mod_base = OTHER; note = 2'-fluorouridine-3'-phosphorothioate
  modified_base 3: mod_base = OTHER; note = 2'-O-methylcytidine-3'-phosphate
  modified_base 4: mod_base = OTHER; note = 2'-fluorocytidine-3'-phosphate
  modified_base 5: mod_base = OTHER; note = 2'-O-methylguanosine-3'-phosphate
  modified_base 6: mod_base = OTHER; note = 2'-fluorouridine-3'-phosphate
  modified_base 7: mod_base = OTHER; note = 2'-O-methylguanosine-3'-phosphate
  modified_base 8: mod_base = OTHER; note = 2'-fluorouridine-3'-phosphate
  modified_base 9: mod_base = OTHER; note = 2'-O-methyluridine-3'-phosphate
  modified_base 10: mod_base = OTHER; note = 2'-fluoroguanosine-3'-phosphate
  modified_base 11: mod_base = OTHER; note = 2'-O-methyluridine-3'-phosphate
  modified_base 12: mod_base = OTHER; note = 2'-fluoroadenosine-3'-phosphate
  modified_base 13: mod_base = OTHER; note = 2'-O-methyluridine-3'-phosphate
  modified_base 14: mod_base = OTHER; note = 2'-fluoroguanosine-3'-phosphate
  modified_base 15: mod_base = OTHER; note = 2'-O-methyluridine-3'-phosphate
  modified_base 16: mod_base = OTHER; note = 2'-fluoroguanosine-3'-phosphate
  modified_base 17: mod_base = OTHER; note = 2'-O-methylcytidine-3'-phosphate
  modified_base 18: mod_base = OTHER; note = 2'-fluoroadenosine-3'-phosphate
  modified_base 19: mod_base = OTHER; note = 2'-O-methyladenosine-3'-phosphate
  modified_base 20: mod_base = OTHER; note = 2'-fluoroguanosine-3'-phosphate
  modified_base 21: mod_base = OTHER; note = 2'-O-methyladenosine-3'-phosphorothioate
  modified_base 22: mod_base = OTHER; note = 2'-deoxythymidine-3'-phosphate
  modified_base 23: mod_base = OTHER; note = 2'-deoxythymidine-3'-phosphate
ttccgtgttgtatgtgcaagatt

SEQ ID NO: 291 - RNA, 23 nt, synthetic construct
  source 1..23: mol_type = other RNA
  modified_base 1: mod_base = OTHER; note = 2'-O-methyluridine-3'-phosphorothioate
  modified_base 2: mod_base = OTHER; note = 2'-fluorouridine-3'-phosphorothioate
  modified_base 3: mod_base = OTHER; note = 2'-O-methylcytidine-3'-phosphate
  modified_base 4: mod_base = OTHER; note = 2'-fluorocytidine-3'-phosphate
  modified_base 5: mod_base = OTHER; note = 2'-O-methyladenosine-3'-phosphate
  modified_base 6: mod_base = OTHER; note = 2'-fluorocytidine-3'-phosphate
  modified_base 7: mod_base = OTHER; note = 2'-O-methyluridine-3'-phosphate
  modified_base 8: mod_base = OTHER; note = 2'-fluorocytidine-3'-phosphate
  modified_base 9: mod_base = OTHER; note = 2'-O-methyladenosine-3'-phosphate
  modified_base 10: mod_base = OTHER; note = 2'-fluorocytidine-3'-phosphate
  modified_base 11: mod_base = OTHER; note = 2'-O-methylcytidine-3'-phosphate
  modified_base 12: mod_base = OTHER; note = 2'-fluorocytidine-3'-phosphate
  modified_base 13: mod_base = OTHER; note = 2'-O-methylguanosine-3'-phosphate
  modified_base 14: mod_base = OTHER; note = 2'-fluoroguanosine-3'-phosphate
  modified_base 15: mod_base = OTHER; note = 2'-O-methylguanosine-3'-phosphate
  modified_base 16: mod_base = OTHER; note = 2'-fluoroadenosine-3'-phosphate
  modified_base 17: mod_base = OTHER; note = 2'-O-methyladenosine-3'-phosphate
  modified_base 18: mod_base = OTHER; note = 2'-fluoroguanosine-3'-phosphate
  modified_base 19: mod_base = OTHER; note = 2'-O-methylcytidine-3'-phosphate
  modified_base 20: mod_base = OTHER; note = 2'-fluoroguanosine-3'-phosphate
  modified_base 21: mod_base = OTHER; note = 2'-O-methylguanosine-3'-phosphorothioate
  modified_base 22: mod_base = OTHER; note = 2'-deoxythymidine-3'-phosphate
  modified_base 23: mod_base = OTHER; note = 2'-deoxythymidine-3'-phosphate
ttccactcacccgggaagcggtt

SEQ ID NO: 292 - RNA, 23 nt, synthetic construct
  source 1..23: mol_type = other RNA
  modified_base 1: mod_base = OTHER; note = 2'-O-methyluridine-3'-phosphorothioate
  modified_base 2: mod_base = OTHER; note = 2'-fluorouridine-3'-phosphorothioate
  modified_base 3: mod_base = OTHER; note = 2'-O-methylcytidine-3'-phosphate
  modified_base 4: mod_base = OTHER; note = 2'-fluorocytidine-3'-phosphate
  modified_base 5: mod_base = OTHER; note = 2'-O-methyladenosine-3'-phosphate
  modified_base 6: mod_base = OTHER; note = 2'-fluoroguanosine-3'-phosphate
  modified_base 7: mod_base = OTHER; note = 2'-O-methyluridine-3'-phosphate
  modified_base 8: mod_base = OTHER; note = 2'-fluorouridine-3'-phosphate
  modified_base 9: mod_base = OTHER; note = 2'-O-methyladenosine-3'-phosphate
  modified_base 10: mod_base = OTHER; note = 2'-fluorocytidine-3'-phosphate
  modified_base 11: mod_base = OTHER; note = 2'-O-methylcytidine-3'-phosphate
  modified_base 12: mod_base = OTHER; note = 2'-fluorocytidine-3'-phosphate
  modified_base 13: mod_base = OTHER; note = 2'-O-methylguanosine-3'-phosphate
  modified_base 14: mod_base = OTHER; note = 2'-fluoroguanosine-3'-phosphate
  modified_base 15: mod_base = OTHER; note = 2'-O-methylguanosine-3'-phosphate
  modified_base 16: mod_base = OTHER; note = 2'-fluoroadenosine-3'-phosphate
  modified_base 17: mod_base = OTHER; note = 2'-O-methyladenosine-3'-phosphate
  modified_base 18: mod_base = OTHER; note = 2'-fluoroguanosine-3'-phosphate
  modified_base 19: mod_base = OTHER; note = 2'-O-methylcytidine-3'-phosphate
  modified_base 20: mod_base = OTHER; note = 2'-fluoroguanosine-3'-phosphate
  modified_base 21: mod_base = OTHER; note = 2'-O-methylguanosine-3'-phosphorothioate
  modified_base 22: mod_base = OTHER; note = 2'-deoxythymidine-3'-phosphate
  modified_base 23: mod_base = OTHER; note = 2'-deoxythymidine-3'-phosphate
ttccagttacccgggaagcggtt

SEQ ID NO: 293 - RNA, 23 nt, synthetic construct
  source 1..23: mol_type = other RNA
  modified_base 1: mod_base = OTHER; note = 2'-O-methyluridine-3'-phosphorothioate
  modified_base 2: mod_base = OTHER; note = 2'-fluorouridine-3'-phosphorothioate
  modified_base 3: mod_base = OTHER; note = 2'-O-methylcytidine-3'-phosphate
  modified_base 4: mod_base = OTHER; note = 2'-fluorocytidine-3'-phosphate
  modified_base 5: mod_base = OTHER; note = 2'-O-methyladenosine-3'-phosphate
  modified_base 6: mod_base = OTHER; note = 2'-fluorouridine-3'-phosphate
  modified_base 7: mod_base = OTHER; note = 2'-O-methyluridine-3'-phosphate
  modified_base 8: mod_base = OTHER; note = 2'-fluorouridine-3'-phosphate
  modified_base 9: mod_base = OTHER; note = 2'-O-methyladenosine-3'-phosphate
  modified_base 10: mod_base = OTHER; note = 2'-fluorocytidine-3'-phosphate
  modified_base 11: mod_base = OTHER; note = 2'-O-methylcytidine-3'-phosphate
  modified_base 12: mod_base = OTHER; note = 2'-fluorocytidine-3'-phosphate
  modified_base 13: mod_base = OTHER; note = 2'-O-methylguanosine-3'-phosphate
  modified_base 14: mod_base = OTHER; note = 2'-fluoroguanosine-3'-phosphate
  modified_base 15: mod_base = OTHER; note = 2'-O-methylguanosine-3'-phosphate
  modified_base 16: mod_base = OTHER; note = 2'-fluoroadenosine-3'-phosphate
  modified_base 17: mod_base = OTHER; note = 2'-O-methyladenosine-3'-phosphate
  modified_base 18: mod_base = OTHER; note = 2'-fluoroguanosine-3'-phosphate
  modified_base 19: mod_base = OTHER; note = 2'-O-methylcytidine-3'-phosphate
  modified_base 20: mod_base = OTHER; note = 2'-fluoroguanosine-3'-phosphate
  modified_base 21: mod_base = OTHER; note = 2'-O-methylguanosine-3'-phosphorothioate
  modified_base 22: mod_base = OTHER; note = 2'-deoxythymidine-3'-phosphate
  modified_base 23: mod_base = OTHER; note = 2'-deoxythymidine-3'-phosphate
ttccatttacccgggaagcggtt

SEQ ID NO: 294 - RNA, 23 nt, synthetic construct
  source 1..23: mol_type = other RNA
  modified_base 1: mod_base = OTHER; note = 2'-O-methyluridine-3'-phosphorothioate
  modified_base 2: mod_base = OTHER; note = 2'-fluorouridine-3'-phosphorothioate
  modified_base 3: mod_base = OTHER; note = 2'-O-methylcytidine-3'-phosphate
  modified_base 4: mod_base = OTHER; note = 2'-fluorocytidine-3'-phosphate
  modified_base 5: mod_base = OTHER; note = 2'-O-methyladenosine-3'-phosphate
  modified_base 6: mod_base = OTHER; note = 2'-fluorouridine-3'-phosphate
  modified_base 7: mod_base = OTHER; note = 2'-O-methyluridine-3'-phosphate
  modified_base 8: mod_base = OTHER; note = 2'-fluorocytidine-3'-phosphate
  modified_base 9: mod_base = OTHER; note = 2'-O-methyladenosine-3'-phosphate
  modified_base 10: mod_base = OTHER; note = 2'-fluorocytidine-3'-phosphate
  modified_base 11: mod_base = OTHER; note = 2'-O-methylcytidine-3'-phosphate
  modified_base 12: mod_base = OTHER; note = 2'-fluorocytidine-3'-phosphate
  modified_base 13: mod_base = OTHER; note = 2'-O-methyluridine-3'-phosphate
  modified_base 14: mod_base = OTHER; note = 2'-fluoroguanosine-3'-phosphate
  modified_base 15: mod_base = OTHER; note = 2'-O-methylguanosine-3'-phosphate
  modified_base 16: mod_base = OTHER; note = 2'-fluoroadenosine-3'-phosphate
  modified_base 17: mod_base = OTHER; note = 2'-O-methyladenosine-3'-phosphate
  modified_base 18: mod_base = OTHER; note = 2'-fluorouridine-3'-phosphate
  modified_base 19: mod_base = OTHER; note = 2'-O-methylcytidine-3'-phosphate
  modified_base 20: mod_base = OTHER; note = 2'-fluoroguanosine-3'-phosphate
  modified_base 21: mod_base = OTHER; note = 2'-O-methylcytidine-3'-phosphorothioate
  modified_base 22: mod_base = OTHER; note = 2'-deoxythymidine-3'-phosphate
  modified_base 23: mod_base = OTHER; note = 2'-deoxythymidine-3'-phosphate
ttccattcaccctggaatcgctt

SEQ ID NO: 295 - RNA, 23 nt, synthetic construct
  source 1..23: mol_type = other RNA
  modified_base 1: mod_base = OTHER; note = 2'-O-methyluridine-3'-phosphorothioate
  modified_base 2: mod_base = OTHER; note = 2'-fluorouridine-3'-phosphorothioate
  modified_base 3: mod_base = OTHER; note = 2'-O-methylcytidine-3'-phosphate
  modified_base 4: mod_base = OTHER; note = 2'-fluorocytidine-3'-phosphate
  modified_base 5: mod_base = OTHER; note = 2'-O-methyladenosine-3'-phosphate
  modified_base 6: mod_base = OTHER; note = 2'-fluorouridine-3'-phosphate
  modified_base 7: mod_base = OTHER; note = 2'-O-methyluridine-3'-phosphate
  modified_base 8: mod_base = OTHER; note = 2'-fluorocytidine-3'-phosphate
  modified_base 9: mod_base = OTHER; note = 2'-O-methyladenosine-3'-phosphate
  modified_base 10: mod_base = OTHER; note = 2'-fluorocytidine-3'-phosphate
  modified_base 11: mod_base = OTHER; note = 2'-O-methylcytidine-3'-phosphate
  modified_base 12: mod_base = OTHER; note = 2'-fluorocytidine-3'-phosphate
  modified_base 13: mod_base = OTHER; note = 2'-O-methylguanosine-3'-phosphate
  modified_base 14: mod_base = OTHER; note = 2'-fluoroguanosine-3'-phosphate
  modified_base 15: mod_base = OTHER; note = 2'-O-methylguanosine-3'-phosphate
  modified_base 16: mod_base = OTHER; note = 2'-fluoroadenosine-3'-phosphate
  modified_base 17: mod_base = OTHER; note = 2'-O-methyladenosine-3'-phosphate
  modified_base 18: mod_base = OTHER; note = 2'-fluoroguanosine-3'-phosphate
  modified_base 19: mod_base = OTHER; note = 2'-O-methylcytidine-3'-phosphate
  modified_base 20: mod_base = OTHER; note = 2'-fluoroguanosine-3'-phosphate
  modified_base 21: mod_base = OTHER; note = 2'-O-methylguanosine-3'-phosphorothioate
  modified_base 22: mod_base = OTHER; note = 2'-deoxythymidine-3'-phosphate
  modified_base 23: mod_base = OTHER; note = 2'-deoxythymidine-3'-phosphate
ttccattcacccgggaagcggtt

SEQ ID NO: 296 - RNA, 23 nt, synthetic construct
  source 1..23: mol_type = other RNA
  modified_base 1: mod_base = OTHER; note = 2'-O-methyluridine-3'-phosphorothioate
  modified_base 2: mod_base = OTHER; note = 2'-fluorouridine-3'-phosphorothioate
  modified_base 3: mod_base = OTHER; note = 2'-O-methylcytidine-3'-phosphate
  modified_base 4: mod_base = OTHER; note = 2'-fluorocytidine-3'-phosphate
  modified_base 5: mod_base = OTHER; note = 2'-O-methyladenosine-3'-phosphate
  modified_base 6: mod_base = OTHER; note = 2'-fluorocytidine-3'-phosphate
  modified_base 7: mod_base = OTHER; note = 2'-O-methyluridine-3'-phosphate
  modified_base 8: mod_base = OTHER; note = 2'-fluorocytidine-3'-phosphate
  modified_base 9: mod_base = OTHER; note = 2'-O-methylguanosine-3'-phosphate
  modified_base 10: mod_base = OTHER; note = 2'-fluorocytidine-3'-phosphate
  modified_base 11: mod_base = OTHER; note = 2'-O-methylcytidine-3'-phosphate
  modified_base 12: mod_base = OTHER; note = 2'-fluorocytidine-3'-phosphate
  modified_base 13: mod_base = OTHER; note = 2'-O-methyluridine-3'-phosphate
  modified_base 14: mod_base = OTHER; note = 2'-fluoroguanosine-3'-phosphate
  modified_base 15: mod_base = OTHER; note = 2'-O-methylguanosine-3'-phosphate
  modified_base 16: mod_base = OTHER; note = 2'-fluoroadenosine-3'-phosphate
  modified_base 17: mod_base = OTHER; note = 2'-O-methyladenosine-3'-phosphate
  modified_base 18: mod_base = OTHER; note = 2'-fluoroguanosine-3'-phosphate
  modified_base 19: mod_base = OTHER; note = 2'-O-methylcytidine-3'-phosphate
  modified_base 20: mod_base = OTHER; note = 2'-fluoroguanosine-3'-phosphate
  modified_base 21: mod_base = OTHER; note = 2'-O-methylguanosine-3'-phosphorothioate
  modified_base 22: mod_base = OTHER; note = 2'-deoxythymidine-3'-phosphate
  modified_base 23: mod_base = OTHER; note = 2'-deoxythymidine-3'-phosphate
ttccactcgccctggaagcggtt

SEQ ID NO: 297 - RNA, 23 nt, synthetic construct
  source 1..23: mol_type = other RNA
  modified_base 1: mod_base = OTHER; note = 2'-O-methyluridine-3'-phosphorothioate
  modified_base 2: mod_base = OTHER; note = 2'-fluorouridine-3'-phosphorothioate
  modified_base 3: mod_base = OTHER; note = 2'-O-methylcytidine-3'-phosphate
  modified_base 4: mod_base = OTHER; note = 2'-fluoroadenosine-3'-phosphate
  modified_base 5: mod_base = OTHER; note = 2'-O-methylguanosine-3'-phosphate
  modified_base 6: mod_base = OTHER; note = 2'-fluorocytidine-3'-phosphate
  modified_base 7: mod_base = OTHER; note = 2'-O-methyladenosine-3'-phosphate
  modified_base 8: mod_base = OTHER; note = 2'-fluorouridine-3'-phosphate
  modified_base 9: mod_base = OTHER; note = 2'-O-methyluridine-3'-phosphate
  modified_base 10: mod_base = OTHER; note = 2'-fluorocytidine-3'-phosphate
  modified_base 11: mod_base = OTHER; note = 2'-O-methyluridine-3'-phosphate
  modified_base 12: mod_base = OTHER; note = 2'-fluoroguanosine-3'-phosphate
  modified_base 13: mod_base = OTHER; note = 2'-O-methyladenosine-3'-phosphate
  modified_base 14: mod_base = OTHER; note = 2'-fluorouridine-3'-phosphate
  modified_base 15: mod_base = OTHER; note = 2'-O-methylcytidine-3'-phosphate
  modified_base 16: mod_base = OTHER; note = 2'-fluorouridine-3'-phosphate
  modified_base 17: mod_base = OTHER; note = 2'-O-methylcytidine-3'-phosphate
  modified_base 18: mod_base = OTHER; note = 2'-fluorocytidine-3'-phosphate
  modified_base 19: mod_base = OTHER; note = 2'-O-methyluridine-3'-phosphate
  modified_base 20: mod_base = OTHER; note = 2'-fluoroguanosine-3'-phosphate
  modified_base 21: mod_base = OTHER; note = 2'-O-methylguanosine-3'-phosphorothioate
  modified_base 22: mod_base = OTHER; note = 2'-O-methyluridine-3'-phosphorothioate
  modified_base 23: mod_base = OTHER; note = 2'-O-methyluridine-3'-phosphate
ttcagcattctgatctcctggtt

SEQ ID NO: 298 - RNA, 23 nt, synthetic construct
  source 1..23: mol_type = other RNA
  modified_base 1: mod_base = OTHER; note = 2'-O-methyluridine-3'-phosphorothioate
  modified_base 2: mod_base = OTHER; note = 2'-fluorouridine-3'-phosphorothioate
  modified_base 3: mod_base = OTHER; note = 2'-O-methylcytidine-3'-phosphate
  modified_base 4: mod_base = OTHER; note = 2'-fluoroadenosine-3'-phosphate
  modified_base 5: mod_base = OTHER; note = 2'-O-methylguanosine-3'-phosphate
  modified_base 6: mod_base = OTHER; note = 2'-fluorocytidine-3'-phosphate
  modified_base 7: mod_base = OTHER; note = 2'-O-methyladenosine-3'-phosphate
  modified_base 8: mod_base = OTHER; note = 2'-fluorouridine-3'-phosphate
  modified_base 9: mod_base = OTHER; note = 2'-O-methyluridine-3'-phosphate
  modified_base 10: mod_base = OTHER; note = 2'-fluorocytidine-3'-phosphate
  modified_base 11: mod_base = OTHER; note = 2'-O-methyluridine-3'-phosphate
  modified_base 12: mod_base = OTHER; note = 2'-fluoroguanosine-3'-phosphate
  modified_base 13: mod_base = OTHER; note = 2'-O-methyladenosine-3'-phosphate
  modified_base 14: mod_base = OTHER; note = 2'-fluorouridine-3'-phosphate
  modified_base 15: mod_base = OTHER; note = 2'-O-methylcytidine-3'-phosphate
  modified_base 16: mod_base = OTHER; note = 2'-fluorouridine-3'-phosphate
  modified_base 17: mod_base = OTHER; note = 2'-O-methylcytidine-3'-phosphate
  modified_base 18: mod_base = OTHER; note = 2'-fluorocytidine-3'-phosphate
  modified_base 19: mod_base = OTHER; note = 2'-O-methyluridine-3'-phosphate
  modified_base 20: mod_base = OTHER; note = 2'-fluoroguanosine-3'-phosphate
  modified_base 21: mod_base = OTHER; note = 2'-O-methyladenosine-3'-phosphorothioate
  modified_base 22: mod_base = OTHER; note = 2'-O-methyluridine-3'-phosphorothioate
  modified_base 23: mod_base = OTHER; note = 2'-O-methyluridine-3'-phosphate
ttcagcattctgatctcctgatt

SEQ ID NO: 299 - RNA, 23 nt, synthetic construct
  source 1..23: mol_type = other RNA
  modified_base 1: mod_base = OTHER; note = 2'-O-methyluridine-3'-phosphorothioate
  modified_base 2: mod_base = OTHER; note = 2'-fluorouridine-3'-phosphorothioate
  modified_base 3: mod_base = OTHER; note = 2'-O-methylcytidine-3'-phosphate
  modified_base 4: mod_base = OTHER; note = 2'-fluorouridine-3'-phosphate
  modified_base 5: mod_base = OTHER; note = 2'-O-methyluridine-3'-phosphate
  modified_base 6: mod_base = OTHER; note = 2'-fluorocytidine-3'-phosphate
  modified_base 7: mod_base = OTHER; note = 2'-O-methyladenosine-3'-phosphate
  modified_base 8: mod_base = OTHER; note = 2'-fluoroguanosine-3'-phosphate
  modified_base 9: mod_base = OTHER; note = 2'-O-methylcytidine-3'-phosphate
  modified_base 10: mod_base = OTHER; note = 2'-fluoroadenosine-3'-phosphate
  modified_base 11: mod_base = OTHER; note = 2'-O-methyluridine-3'-phosphate
  modified_base 12: mod_base = OTHER; note = 2'-fluorouridine-3'-phosphate
  modified_base 13: mod_base = OTHER; note = 2'-O-methylcytidine-3'-phosphate
  modified_base 14: mod_base = OTHER; note = 2'-fluorouridine-3'-phosphate
  modified_base 15: mod_base = OTHER; note = 2'-O-methylguanosine-3'-phosphate
  modified_base 16: mod_base = OTHER; note = 2'-fluoroadenosine-3'-phosphate
  modified_base 17: mod_base = OTHER; note = 2'-O-methyluridine-3'-phosphate
  modified_base 18: mod_base = OTHER; note = 2'-fluorocytidine-3'-phosphate
  modified_base 19: mod_base = OTHER; note = 2'-O-methyluridine-3'-phosphate
  modified_base 20: mod_base = OTHER; note = 2'-fluorocytidine-3'-phosphate
  modified_base 21: mod_base = OTHER; note = 2'-O-methylcytidine-3'-phosphorothioate
  modified_base 22: mod_base = OTHER; note = 2'-O-methyluridine-3'-phosphorothioate
  modified_base 23: mod_base = OTHER; note = 2'-O-methyluridine-3'-phosphate
ttcttcagcattctgatctcctt

SEQ ID NO: 300 - RNA, 23 nt, synthetic construct
  source 1..23: mol_type = other RNA
  modified_base 1: mod_base = OTHER; note = 2'-O-methyluridine-3'-phosphorothioate
  modified_base 2: mod_base = OTHER; note = 2'-fluorouridine-3'-phosphorothioate
  modified_base 3: mod_base = OTHER; note = 2'-O-methylcytidine-3'-phosphate
  modified_base 4: mod_base = OTHER; note = 2'-fluorouridine-3'-phosphate
  modified_base 5: mod_base = OTHER; note = 2'-O-methylguanosine-3'-phosphate
  modified_base 6: mod_base = OTHER; note = 2'-fluorouridine-3'-phosphate
  modified_base 7: mod_base = OTHER; note = 2'-O-methylguanosine-3'-phosphate
  modified_base 8: mod_base = OTHER; note = 2'-fluorouridine-3'-phosphate
  modified_base 9: mod_base = OTHER; note = 2'-O-methyluridine-3'-phosphate
  modified_base 10: mod_base = OTHER; note = 2'-fluoroguanosine-3'-phosphate
  modified_base 11: mod_base = OTHER; note = 2'-O-methyluridine-3'-phosphate
  modified_base 12: mod_base = OTHER; note = 2'-fluoroadenosine-3'-phosphate
  modified_base 13: mod_base = OTHER; note = 2'-O-methyluridine-3'-phosphate
  modified_base 14: mod_base = OTHER; note = 2'-fluoroguanosine-3'-phosphate
  modified_base 15: mod_base = OTHER; note = 2'-O-methyluridine-3'-phosphate
  modified_base 16: mod_base = OTHER; note = 2'-fluoroguanosine-3'-phosphate
  modified_base 17: mod_base = OTHER; note = 2'-O-methylcytidine-3'-phosphate
  modified_base 18: mod_base = OTHER; note = 2'-fluoroadenosine-3'-phosphate
  modified_base 19: mod_base = OTHER; note = 2'-O-methyluridine-3'-phosphate
  modified_base 20: mod_base = OTHER; note = 2'-fluoroguanosine-3'-phosphate
  modified_base 21: mod_base = OTHER; note = 2'-O-methyladenosine-3'-phosphorothioate
  modified_base 22: mod_base = OTHER; note = 2'-O-methyluridine-3'-phosphorothioate
  modified_base 23: mod_base = OTHER; note = 2'-O-methyluridine-3'-phosphate
ttctgtgttgtatgtgcatgatt

SEQ ID NO: 301 - RNA, 23 nt, synthetic construct
  source 1..23: mol_type = other RNA
  modified_base 1: mod_base = OTHER; note = 2'-O-methyluridine-3'-phosphorothioate
  modified_base 2: mod_base = OTHER; note = 2'-fluorouridine-3'-phosphorothioate
  modified_base 3: mod_base = OTHER; note = 2'-O-methylcytidine-3'-phosphate
  modified_base 4: mod_base = OTHER; note = 2'-fluorouridine-3'-phosphate
  modified_base 5: mod_base = OTHER; note = 2'-O-methylguanosine-3'-phosphate
  modified_base 6: mod_base = OTHER; note = 2'-fluorouridine-3'-phosphate
  modified_base 7: mod_base = OTHER; note = 2'-O-methylguanosine-3'-phosphate
  modified_base 8: mod_base = OTHER; note = 2'-fluorouridine-3'-phosphate
  modified_base 9: mod_base = OTHER; note = 2'-O-methyluridine-3'-phosphate
  modified_base 10: mod_base = OTHER; note = 2'-fluoroguanosine-3'-phosphate
  modified_base 11: mod_base = OTHER; note = 2'-O-methyluridine-3'-phosphate
  modified_base 12: mod_base = OTHER; note = 2'-fluoroadenosine-3'-phosphate
  modified_base 13: mod_base = OTHER; note = 2'-O-methyluridine-3'-phosphate
  modified_base 14: mod_base = OTHER; note = 2'-fluoroguanosine-3'-phosphate
  modified_base 15: mod_base = OTHER; note = 2'-O-methyluridine-3'-phosphate
  modified_base 16: mod_base = OTHER; note = 2'-fluoroguanosine-3'-phosphate
  modified_base 17: mod_base = OTHER; note = 2'-O-methylcytidine-3'-phosphate
  modified_base 18: mod_base = OTHER; note = 2'-fluoroadenosine-3'-phosphate
  modified_base 19: mod_base = OTHER; note = 2'-O-methylcytidine-3'-phosphate
  modified_base 20: mod_base = OTHER; note = 2'-fluoroguanosine-3'-phosphate
  modified_base 21: mod_base = OTHER; note = 2'-O-methyladenosine-3'-phosphorothioate
  modified_base 22: mod_base = OTHER; note = 2'-O-methyluridine-3'-phosphorothioate
  modified_base 23: mod_base = OTHER; note = 2'-O-methyluridine-3'-phosphate
ttctgtgttgtatgtgcacgatt

SEQ ID NO: 302 - RNA, 23 nt, synthetic construct
  source 1..23: mol_type = other RNA
  modified_base 1: mod_base = OTHER; note = 2'-O-methyluridine-3'-phosphorothioate
  modified_base 2: mod_base = OTHER; note = 2'-fluorouridine-3'-phosphorothioate
  modified_base 3: mod_base = OTHER; note = 2'-O-methylcytidine-3'-phosphate
  modified_base 4: mod_base = OTHER; note = 2'-fluorouridine-3'-phosphate
  modified_base 5: mod_base = OTHER; note = 2'-O-methylguanosine-3'-phosphate
  modified_base 6: mod_base = OTHER; note = 2'-fluorouridine-3'-phosphate
  modified_base 7: mod_base = OTHER; note = 2'-O-methylguanosine-3'-phosphate
  modified_base 8: mod_base = OTHER; note = 2'-fluorouridine-3'-phosphate
  modified_base 9: mod_base = OTHER; note = 2'-O-methyluridine-3'-phosphate
  modified_base 10: mod_base = OTHER; note = 2'-fluoroguanosine-3'-phosphate
  modified_base 11: mod_base = OTHER; note = 2'-O-methyluridine-3'-phosphate
  modified_base 12: mod_base = OTHER; note = 2'-fluoroadenosine-3'-phosphate
  modified_base 13: mod_base = OTHER; note = 2'-O-methyluridine-3'-phosphate
  modified_base 14: mod_base = OTHER; note = 2'-fluoroguanosine-3'-phosphate
  modified_base 15: mod_base = OTHER; note = 2'-O-methyluridine-3'-phosphate
  modified_base 16: mod_base = OTHER; note = 2'-fluoroadenosine-3'-phosphate
  modified_base 17: mod_base = OTHER; note = 2'-O-methylcytidine-3'-phosphate
  modified_base 18: mod_base = OTHER; note = 2'-fluoroadenosine-3'-phosphate
  modified_base 19: mod_base = OTHER; note = 2'-O-methylguanosine-3'-phosphate
  modified_base 20: mod_base = OTHER; note = 2'-fluoroguanosine-3'-phosphate
  modified_base 21: mod_base = OTHER; note = 2'-O-methyladenosine-3'-phosphorothioate
  modified_base 22: mod_base = OTHER; note = 2'-O-methyluridine-3'-phosphorothioate
  modified_base 23: mod_base = OTHER; note = 2'-O-methyluridine-3'-phosphate
ttctgtgttgtatgtacaggatt

SEQ ID NO: 303 - RNA, 23 nt, synthetic construct
  source 1..23: mol_type = other RNA
  modified_base 1: mod_base = OTHER; note = 2'-O-methyluridine-3'-phosphorothioate
  modified_base 2: mod_base = OTHER; note = 2'-fluorouridine-3'-phosphorothioate
  modified_base 3: mod_base = OTHER; note = 2'-O-methylcytidine-3'-phosphate
  modified_base 4: mod_base = OTHER; note = 2'-fluorocytidine-3'-phosphate
  modified_base 5: mod_base = OTHER; note = 2'-O-methylguanosine-3'-phosphate
  modified_base 6: mod_base = OTHER; note = 2'-fluorouridine-3'-phosphate
  modified_base 7: mod_base = OTHER; note = 2'-O-methylguanosine-3'-phosphate
  modified_base 8: mod_base = OTHER; note = 2'-fluorouridine-3'-phosphate
  modified_base 9: mod_base = OTHER; note = 2'-O-methyluridine-3'-phosphate
  modified_base 10: mod_base = OTHER; note = 2'-fluoroguanosine-3'-phosphate
  modified_base 11: mod_base = OTHER; note = 2'-O-methyluridine-3'-phosphate
  modified_base 12: mod_base = OTHER; note = 2'-fluoroadenosine-3'-phosphate
  modified_base 13: mod_base = OTHER; note = 2'-O-methylcytidine-3'-phosphate
  modified_base 14: mod_base = OTHER; note = 2'-fluoroguanosine-3'-phosphate
  modified_base 15: mod_base = OTHER; note = 2'-O-methyluridine-3'-phosphate
  modified_base 16: mod_base = OTHER; note = 2'-fluoroguanosine-3'-phosphate
  modified_base 17: mod_base = OTHER; note = 2'-O-methylcytidine-3'-phosphate
  modified_base 18: mod_base = OTHER; note = 2'-fluoroadenosine-3'-phosphate
  modified_base 19: mod_base = OTHER; note = 2'-O-methylguanosine-3'-phosphate
  modified_base 20: mod_base = OTHER; note = 2'-fluoroguanosine-3'-phosphate
  modified_base 21: mod_base = OTHER; note = 2'-O-methyladenosine-3'-phosphorothioate
  modified_base 22: mod_base = OTHER; note = 2'-O-methyluridine-3'-phosphorothioate
  modified_base 23: mod_base = OTHER; note = 2'-O-methyluridine-3'-phosphate
ttccgtgttgtacgtgcaggatt

SEQ ID NO: 304 - RNA, 23 nt, synthetic construct
  source 1..23: mol_type = other RNA
  modified_base 1: mod_base = OTHER; note = 2'-O-methyluridine-3'-phosphorothioate
  modified_base 2: mod_base = OTHER; note = 2'-fluorouridine-3'-phosphorothioate
  modified_base 3: mod_base = OTHER; note = 2'-O-methylcytidine-3'-phosphate
  modified_base 4: mod_base = OTHER; note = 2'-fluorouridine-3'-phosphate
  modified_base 5: mod_base = OTHER; note = 2'-O-methylguanosine-3'-phosphate
  modified_base 6: mod_base = OTHER; note = 2'-fluorouridine-3'-phosphate
  modified_base 7: mod_base = OTHER; note = 2'-O-methylguanosine-3'-phosphate
  modified_base 8: mod_base = OTHER; note = 2'-fluorouridine-3'-phosphate
  modified_base 9: mod_base = OTHER; note = 2'-O-methyluridine-3'-phosphate
  modified_base 10: mod_base = OTHER; note = 2'-fluoroguanosine-3'-phosphate
  modified_base 11: mod_base = OTHER; note = 2'-O-methyluridine-3'-phosphate
  modified_base 12: mod_base = OTHER; note = 2'-fluoroadenosine-3'-phosphate
  modified_base 13: mod_base = OTHER; note = 2'-O-methylcytidine-3'-phosphate
  modified_base 14: mod_base = OTHER; note = 2'-fluoroguanosine-3'-phosphate
  modified_base 15: mod_base = OTHER; note = 2'-O-methyluridine-3'-phosphate
  modified_base 16: mod_base = OTHER; note = 2'-fluoroadenosine-3'-phosphate
  modified_base 17: mod_base = OTHER; note = 2'-O-methylcytidine-3'-phosphate
  modified_base 18: mod_base = OTHER; note = 2'-fluoroadenosine-3'-phosphate
  modified_base 19: mod_base = OTHER; note = 2'-O-methylguanosine-3'-phosphate
  modified_base 20: mod_base = OTHER; note = 2'-fluoroguanosine-3'-phosphate
  modified_base 21: mod_base = OTHER; note = 2'-O-methyladenosine-3'-phosphorothioate
  modified_base 22: mod_base = OTHER; note = 2'-O-methyluridine-3'-phosphorothioate
  modified_base 23: mod_base = OTHER; note = 2'-O-methyluridine-3'-phosphate
ttctgtgttgtacgtacaggatt

SEQ ID NO: 305 - RNA, 23 nt, synthetic construct
  source 1..23: mol_type = other RNA
  modified_base 1: mod_base = OTHER; note = 2'-O-methyluridine-3'-phosphorothioate
  modified_base 2: mod_base = OTHER; note = 2'-fluorouridine-3'-phosphorothioate
  modified_base 3: mod_base = OTHER; note = 2'-O-methylcytidine-3'-phosphate
  modified_base 4: mod_base = OTHER; note = 2'-fluorocytidine-3'-phosphate
  modified_base 5: mod_base = OTHER; note = 2'-O-methylguanosine-3'-phosphate
  modified_base 6: mod_base = OTHER; note = 2'-fluorouridine-3'-phosphate
  modified_base 7: mod_base = OTHER; note = 2'-O-methylguanosine-3'-phosphate
  modified_base 8: mod_base = OTHER; note = 2'-fluorouridine-3'-phosphate
  modified_base 9: mod_base = OTHER; note = 2'-O-methyluridine-3'-phosphate
  modified_base 10: mod_base = OTHER; note = 2'-fluoroguanosine-3'-phosphate
  modified_base 11: mod_base = OTHER; note = 2'-O-methyluridine-3'-phosphate
  modified_base 12: mod_base = OTHER; note = 2'-fluoroadenosine-3'-phosphate
  modified_base 13: mod_base = OTHER; note = 2'-O-methyluridine-3'-phosphate
  modified_base 14: mod_base = OTHER; note = 2'-fluoroguanosine-3'-phosphate
  modified_base 15: mod_base = OTHER; note = 2'-O-methyluridine-3'-phosphate
  modified_base 16: mod_base = OTHER; note = 2'-fluoroguanosine-3'-phosphate
  modified_base 17: mod_base = OTHER; note = 2'-O-methylcytidine-3'-phosphate
  modified_base 18: mod_base = OTHER; note = 2'-fluoroadenosine-3'-phosphate
  modified_base 19: mod_base = OTHER; note = 2'-O-methyladenosine-3'-phosphate
  modified_base 20: mod_base = OTHER; note = 2'-fluoroguanosine-3'-phosphate
  modified_base 21: mod_base = OTHER; note = 2'-O-methyladenosine-3'-phosphorothioate
  modified_base 22: mod_base = OTHER; note = 2'-O-methyluridine-3'-phosphorothioate
  modified_base 23: mod_base = OTHER; note = 2'-O-methyluridine-3'-phosphate
ttccgtgttgtatgtgcaagatt

SEQ ID NO: 306 - RNA, 23 nt, synthetic construct
  source 1..23: mol_type = other RNA
  modified_base 1: mod_base = OTHER; note = 2'-O-methyluridine-3'-phosphorothioate
  modified_base 2: mod_base = OTHER; note = 2'-fluorouridine-3'-phosphorothioate
  modified_base 3: mod_base = OTHER; note = 2'-O-methylcytidine-3'-phosphate
  modified_base 4: mod_base = OTHER; note = 2'-fluorocytidine-3'-phosphate
  modified_base 5: mod_base = OTHER; note = 2'-O-methyladenosine-3'-phosphate
  modified_base 6: mod_base = OTHER; note = 2'-fluorocytidine-3'-phosphate
  modified_base 7: mod_base = OTHER; note = 2'-O-methyluridine-3'-phosphate
  modified_base 8: mod_base = OTHER; note = 2'-fluorocytidine-3'-phosphate
  modified_base 9: mod_base = OTHER; note = 2'-O-methyladenosine-3'-phosphate
  modified_base 10: mod_base = OTHER; note = 2'-fluorocytidine-3'-phosphate
  modified_base 11: mod_base = OTHER; note = 2'-O-methylcytidine-3'-phosphate
  modified_base 12: mod_base = OTHER; note = 2'-fluorocytidine-3'-phosphate
  modified_base 13: mod_base = OTHER; note = 2'-O-methylguanosine-3'-phosphate
  modified_base 14: mod_base = OTHER; note = 2'-fluoroguanosine-3'-phosphate
  modified_base 15: mod_base = OTHER; note = 2'-O-methylguanosine-3'-phosphate
  modified_base 16: mod_base = OTHER; note = 2'-fluoroadenosine-3'-phosphate
  modified_base 17: mod_base = OTHER; note = 2'-O-methyladenosine-3'-phosphate
  modified_base 18: mod_base = OTHER; note = 2'-fluoroguanosine-3'-phosphate
  modified_base 19: mod_base = OTHER; note = 2'-O-methylcytidine-3'-phosphate
  modified_base 20: mod_base = OTHER; note = 2'-fluoroguanosine-3'-phosphate
  modified_base 21: mod_base = OTHER; note = 2'-O-methylguanosine-3'-phosphorothioate
  modified_base 22: mod_base = OTHER; note = 2'-O-methyluridine-3'-phosphorothioate
  modified_base 23: mod_base = OTHER; note = 2'-O-methyluridine-3'-phosphate
ttccactcacccgggaagcggtt

SEQ ID NO: 307 - RNA, 23 nt, synthetic construct
  source 1..23: mol_type = other RNA
  modified_base 1: mod_base = OTHER; note = 2'-O-methyluridine-3'-phosphorothioate
  modified_base 2: mod_base = OTHER; note = 2'-fluorouridine-3'-phosphorothioate
  modified_base 3: mod_base = OTHER; note = 2'-O-methylcytidine-3'-phosphate
  modified_base 4: mod_base = OTHER; note = 2'-fluorocytidine-3'-phosphate
  modified_base 5: mod_base = OTHER; note = 2'-O-methyladenosine-3'-phosphate
  modified_base 6: mod_base = OTHER; note = 2'-fluoroguanosine-3'-phosphate
  modified_base 7: mod_base = OTHER; note = 2'-O-methyluridine-3'-phosphate
  modified_base 8: mod_base = OTHER; note = 2'-fluorouridine-3'-phosphate
  modified_base 9: mod_base = OTHER; note = 2'-O-methyladenosine-3'-phosphate
  modified_base 10: mod_base = OTHER; note = 2'-fluorocytidine-3'-phosphate
  modified_base 11: mod_base = OTHER; note = 2'-O-methylcytidine-3'-phosphate
  modified_base 12: mod_base = OTHER; note = 2'-fluorocytidine-3'-phosphate
  modified_base 13: mod_base = OTHER; note = 2'-O-methylguanosine-3'-phosphate
  modified_base 14: mod_base = OTHER; note = 2'-fluoroguanosine-3'-phosphate
  modified_base 15: mod_base = OTHER; note = 2'-O-methylguanosine-3'-phosphate
  modified_base 16: mod_base = OTHER; note = 2'-fluoroadenosine-3'-phosphate
  modified_base 17: mod_base = OTHER; note = 2'-O-methyladenosine-3'-phosphate
  modified_base 18: mod_base = OTHER; note = 2'-fluoroguanosine-3'-phosphate
  modified_base 19: mod_base = OTHER; note = 2'-O-methylcytidine-3'-phosphate
  modified_base 20: mod_base = OTHER; note = 2'-fluoroguanosine-3'-phosphate
  modified_base 21: mod_base = OTHER; note = 2'-O-methylguanosine-3'-phosphorothioate
  modified_base 22: mod_base = OTHER; note = 2'-O-methyluridine-3'-phosphorothioate
  modified_base 23: mod_base = OTHER; note = 2'-O-methyluridine-3'-phosphate
ttccagttacccgggaagcggtt

SEQ ID NO: 308 - RNA, 23 nt, synthetic construct
  source 1..23: mol_type = other RNA
  modified_base 1: mod_base = OTHER; note = 2'-O-methyluridine-3'-phosphorothioate
  modified_base 2: mod_base = OTHER; note = 2'-fluorouridine-3'-phosphorothioate
  modified_base 3: mod_base = OTHER; note = 2'-O-methylcytidine-3'-phosphate
  modified_base 4: mod_base = OTHER; note = 2'-fluorocytidine-3'-phosphate
  modified_base 5: mod_base = OTHER; note = 2'-O-methyladenosine-3'-phosphate
  modified_base 6: mod_base = OTHER; note = 2'-fluorouridine-3'-phosphate
  modified_base 7: mod_base = OTHER; note = 2'-O-methyluridine-3'-phosphate
  modified_base 8: mod_base = OTHER; note = 2'-fluorouridine-3'-phosphate
  modified_base 9: mod_base = OTHER; note = 2'-O-methyladenosine-3'-phosphate
  modified_base 10: mod_base = OTHER; note = 2'-fluorocytidine-3'-phosphate
  modified_base 11: mod_base = OTHER; note = 2'-O-methylcytidine-3'-phosphate
  modified_base 12: mod_base = OTHER; note = 2'-fluorocytidine-3'-phosphate
  modified_base 13: mod_base = OTHER; note = 2'-O-methylguanosine-3'-phosphate
  modified_base 14: mod_base = OTHER; note = 2'-fluoroguanosine-3'-phosphate
  modified_base 15: mod_base = OTHER; note = 2'-O-methylguanosine-3'-phosphate
  modified_base 16: mod_base = OTHER; note = 2'-fluoroadenosine-3'-phosphate
  modified_base 17: mod_base = OTHER; note = 2'-O-methyladenosine-3'-phosphate
  modified_base 18: mod_base = OTHER; note = 2'-fluoroguanosine-3'-phosphate
  modified_base 19: mod_base = OTHER; note = 2'-O-methylcytidine-3'-phosphate
  modified_base 20: mod_base = OTHER; note = 2'-fluoroguanosine-3'-phosphate
  modified_base 21: mod_base = OTHER; note = 2'-O-methylguanosine-3'-phosphorothioate
  modified_base 22: mod_base = OTHER; note = 2'-O-methyluridine-3'-phosphorothioate
  modified_base 23: mod_base = OTHER; note = 2'-O-methyluridine-3'-phosphate
ttccatttacccgggaagcggtt

SEQ ID NO: 309 - RNA, 23 nt, synthetic construct
  source 1..23: mol_type = other RNA
  modified_base 1: mod_base = OTHER; note = 2'-O-methyluridine-3'-phosphorothioate
  modified_base 2: mod_base = OTHER; note = 2'-fluorouridine-3'-phosphorothioate
  modified_base 3: mod_base = OTHER; note = 2'-O-methylcytidine-3'-phosphate
  modified_base 4: mod_base = OTHER; note = 2'-fluorocytidine-3'-phosphate
  modified_base 5: mod_base = OTHER; note = 2'-O-methyladenosine-3'-phosphate
  modified_base 6: mod_base = OTHER; note = 2'-fluorouridine-3'-phosphate
  modified_base 7: mod_base = OTHER; note = 2'-O-methyluridine-3'-phosphate
  modified_base 8: mod_base = OTHER; note = 2'-fluorocytidine-3'-phosphate
  modified_base 9: mod_base = OTHER; note = 2'-O-methyladenosine-3'-phosphate
  modified_base 10: mod_base = OTHER; note = 2'-fluorocytidine-3'-phosphate
  modified_base 11: mod_base = OTHER; note = 2'-O-methylcytidine-3'-phosphate
  modified_base 12: mod_base = OTHER; note = 2'-fluorocytidine-3'-phosphate
  modified_base 13: mod_base = OTHER; note = 2'-O-methyluridine-3'-phosphate
  modified_base 14: mod_base = OTHER; note = 2'-fluoroguanosine-3'-phosphate
  modified_base 15: mod_base = OTHER; note = 2'-O-methylguanosine-3'-phosphate
  modified_base 16: mod_base = OTHER; note = 2'-fluoroadenosine-3'-phosphate
  modified_base 17: mod_base = OTHER; note = 2'-O-methyladenosine-3'-phosphate
  modified_base 18: mod_base = OTHER; note = 2'-fluorouridine-3'-phosphate
  modified_base 19: mod_base = OTHER; note = 2'-O-methylcytidine-3'-phosphate
  modified_base 20: mod_base = OTHER; note = 2'-fluoroguanosine-3'-phosphate
  modified_base 21: mod_base = OTHER; note = 2'-O-methylcytidine-3'-phosphorothioate
  modified_base 22: mod_base = OTHER; note = 2'-O-methyluridine-3'-phosphorothioate
  modified_base 23: mod_base = OTHER; note = 2'-O-methyluridine-3'-phosphate
ttccattcaccctggaatcgctt

SEQ ID NO: 310 - RNA, 23 nt, synthetic construct
  source 1..23: mol_type = other RNA
  modified_base 1: mod_base = OTHER; note = 2'-O-methyluridine-3'-phosphorothioate
  modified_base 2: mod_base = OTHER; note = 2'-fluorouridine-3'-phosphorothioate
  modified_base 3: mod_base = OTHER; note = 2'-O-methylcytidine-3'-phosphate
  modified_base 4: mod_base = OTHER; note = 2'-fluorocytidine-3'-phosphate
  modified_base 5: mod_base = OTHER; note = 2'-O-methyladenosine-3'-phosphate
  modified_base 6: mod_base = OTHER; note = 2'-fluorouridine-3'-phosphate
  modified_base 7: mod_base = OTHER; note = 2'-O-methyluridine-3'-phosphate
  modified_base 8: mod_base = OTHER; note = 2'-fluorocytidine-3'-phosphate
  modified_base 9: mod_base = OTHER; note = 2'-O-methyladenosine-3'-phosphate
  modified_base 10: mod_base = OTHER; note = 2'-fluorocytidine-3'-phosphate
  modified_base 11: mod_base = OTHER; note = 2'-O-methylcytidine-3'-phosphate
  modified_base 12: mod_base = OTHER; note = 2'-fluorocytidine-3'-phosphate
  modified_base 13: mod_base = OTHER; note = 2'-O-methylguanosine-3'-phosphate
  modified_base 14: mod_base = OTHER; note = 2'-fluoroguanosine-3'-phosphate
  modified_base 15: mod_base = OTHER; note = 2'-O-methylguanosine-3'-phosphate
  modified_base 16: mod_base = OTHER; note = 2'-fluoroadenosine-3'-phosphate
  modified_base 17: mod_base = OTHER; note = 2'-O-methyladenosine-3'-phosphate
  modified_base 18: mod_base = OTHER; note = 2'-fluoroguanosine-3'-phosphate
  modified_base 19: mod_base = OTHER; note = 2'-O-methylcytidine-3'-phosphate
  modified_base 20: mod_base = OTHER; note = 2'-fluoroguanosine-3'-phosphate
  modified_base 21: mod_base = OTHER; note = 2'-O-methylguanosine-3'-phosphorothioate
  modified_base 22: mod_base = OTHER; note = 2'-O-methyluridine-3'-phosphorothioate
  modified_base 23: mod_base = OTHER; note = 2'-O-methyluridine-3'-phosphate
ttccattcacccgggaagcggtt

SEQ ID NO: 311 - RNA, 23 nt, synthetic construct
  source 1..23: mol_type = other RNA
  modified_base 1: mod_base = OTHER; note = 2'-O-methyluridine-3'-phosphorothioate
  modified_base 2: mod_base = OTHER; note = 2'-fluorouridine-3'-phosphorothioate
  modified_base 3: mod_base = OTHER; note = 2'-O-methylcytidine-3'-phosphate
  modified_base 4: mod_base = OTHER; note = 2'-fluorocytidine-3'-phosphate
  modified_base 5: mod_base = OTHER; note = 2'-O-methyladenosine-3'-phosphate
  modified_base 6: mod_base = OTHER; note = 2'-fluorocytidine-3'-phosphate
  modified_base 7: mod_base = OTHER; note = 2'-O-methyluridine-3'-phosphate
  modified_base 8: mod_base = OTHER; note = 2'-fluorocytidine-3'-phosphate
  modified_base 9: mod_base = OTHER; note = 2'-O-methylguanosine-3'-phosphate
  modified_base 10: mod_base = OTHER; note = 2'-fluorocytidine-3'-phosphate
  modified_base 11: mod_base = OTHER; note = 2'-O-methylcytidine-3'-phosphate
  modified_base 12: mod_base = OTHER; note = 2'-fluorocytidine-3'-phosphate
  modified_base 13: mod_base = OTHER; note = 2'-O-methyluridine-3'-phosphate
  modified_base 14: mod_base = OTHER; note = 2'-fluoroguanosine-3'-phosphate
  modified_base 15: mod_base = OTHER; note = 2'-O-methylguanosine-3'-phosphate
  modified_base 16: mod_base = OTHER; note = 2'-fluoroadenosine-3'-phosphate
  modified_base 17: mod_base = OTHER; note = 2'-O-methyladenosine-3'-phosphate
  modified_base 18: mod_base = OTHER; note = 2'-fluoroguanosine-3'-phosphate
  modified_base 19: mod_base = OTHER; note = 2'-O-methylcytidine-3'-phosphate
  modified_base 20: mod_base = OTHER; note = 2'-fluoroguanosine-3'-phosphate
  modified_base 21: mod_base = OTHER; note = 2'-O-methylguanosine-3'-phosphorothioate
  modified_base 22: mod_base = OTHER; note = 2'-O-methyluridine-3'-phosphorothioate
  modified_base 23: mod_base = OTHER; note = 2'-O-methyluridine-3'-phosphate
  modified_base 21: mod_base = OTHER; note = phosphorothioate linkage
ttccactcgccctggaagcggtt

SEQ ID NO: 312 - RNA, 23 nt, synthetic construct
  source 1..23: mol_type = other RNA
  modified_base 1: mod_base = OTHER; note = 2'-O-methyluridine-3'-phosphorothioate
  modified_base 2: mod_base = OTHER; note = 2'-fluorouridine-3'-phosphorothioate
  modified_base 3: mod_base = OTHER; note = 2'-O-methylcytidine-3'-phosphate
  modified_base 4: mod_base = OTHER; note = 2'-O-methyladenosine-3'-phosphate
  modified_base 5: mod_base = OTHER; note = 2'-O-methylguanosine-3'-phosphate
  modified_base 6: mod_base = OTHER; note = 2'-fluorocytidine-3'-phosphate
  modified_base 7: mod_base = OTHER; note = 2'-O-methyladenosine-3'-phosphate
  modified_base 8: mod_base = OTHER; note = 2'-O-methyluridine-3'-phosphate
  modified_base 9: mod_base = OTHER; note = 2'-O-methyluridine-3'-phosphate
  modified_base 10: mod_base = OTHER; note = 2'-O-methylcytidine-3'-phosphate
  modified_base 11: mod_base = OTHER; note = 2'-O-methyluridine-3'-phosphate
  modified_base 12: mod_base = OTHER; note = 2'-O-methylguanosine-3'-phosphate
  modified_base 13: mod_base = OTHER; note = 2'-O-methyladenosine-3'-phosphate
  modified_base 14: mod_base = OTHER; note = 2'-fluorouridine-3'-phosphate
  modified_base 15: mod_base = OTHER; note = 2'-O-methylcytidine-3'-phosphate
  modified_base 16: mod_base = OTHER; note = 2'-fluorouridine-3'-phosphate
  modified_base 17: mod_base = OTHER; note = 2'-O-methylcytidine-3'-phosphate
  modified_base 18: mod_base = OTHER; note = 2'-O-methylcytidine-3'-phosphate
  modified_base 19: mod_base = OTHER; note = 2'-O-methyluridine-3'-phosphate
  modified_base 20: mod_base = OTHER; note = 2'-O-methylguanosine-3'-phosphate
  modified_base 21: mod_base = OTHER; note = 2'-O-methylguanosine-3'-phosphorothioate
  modified_base 22: mod_base = OTHER; note = 2'-O-methyluridine-3'-phosphorothioate
  modified_base 23: mod_base = OTHER; note = 2'-O-methyluridine-3'-phosphate
ttcagcattctgatctcctggtt

SEQ ID NO: 313 - RNA, 23 nt, synthetic construct
  source 1..23: mol_type = other RNA
  modified_base 1: mod_base = OTHER; note = 2'-O-methyluridine-3'-phosphorothioate
  modified_base 2: mod_base = OTHER; note = 2'-fluorouridine-3'-phosphorothioate
  modified_base 3: mod_base = OTHER; note = 2'-O-methylcytidine-3'-phosphate
  modified_base 4: mod_base = OTHER; note = 2'-O-methyladenosine-3'-phosphate
  modified_base 5: mod_base = OTHER; note = 2'-O-methylguanosine-3'-phosphate
  modified_base 6: mod_base = OTHER; note = 2'-fluorocytidine-3'-phosphate
  modified_base 7: mod_base = OTHER; note = 2'-O-methyladenosine-3'-phosphate
  modified_base 8: mod_base = OTHER; note = 2'-O-methyluridine-3'-phosphate
  modified_base 9: mod_base = OTHER; note = 2'-O-methyluridine-3'-phosphate
  modified_base 10: mod_base = OTHER; note = 2'-O-methylcytidine-3'-phosphate
  modified_base 11: mod_base = OTHER; note = 2'-O-methyluridine-3'-phosphate
  modified_base 12: mod_base = OTHER; note = 2'-O-methylguanosine-3'-phosphate
  modified_base 13: mod_base = OTHER; note = 2'-O-methyladenosine-3'-phosphate
  modified_base 14: mod_base = OTHER; note = 2'-fluorouridine-3'-phosphate
  modified_base 15: mod_base = OTHER; note = 2'-O-methylcytidine-3'-phosphate
  modified_base 16: mod_base = OTHER; note = 2'-fluorouridine-3'-phosphate
  modified_base 17: mod_base = OTHER; note = 2'-O-methylcytidine-3'-phosphate
  modified_base 18: mod_base = OTHER; note = 2'-O-methylcytidine-3'-phosphate
  modified_base 19: mod_base = OTHER; note = 2'-O-methyluridine-3'-phosphate
  modified_base 20: mod_base = OTHER; note = 2'-O-methylguanosine-3'-phosphate
  modified_base 21: mod_base = OTHER; note = 2'-O-methyladenosine-3'-phosphorothioate
  modified_base 22: mod_base = OTHER; note = 2'-O-methyluridine-3'-phosphorothioate
  modified_base 23: mod_base = OTHER; note = 2'-O-methyluridine-3'-phosphate
ttcagcattctgatctcctgatt

SEQ ID NO: 314 - RNA, 23 nt, synthetic construct
  source 1..23: mol_type = other RNA
  modified_base 1: mod_base = OTHER; note = 2'-O-methyluridine-3'-phosphorothioate
  modified_base 2: mod_base = OTHER; note = 2'-fluorouridine-3'-phosphorothioate
  modified_base 3: mod_base = OTHER; note = 2'-O-methylcytidine-3'-phosphate
  modified_base 4: mod_base = OTHER; note = 2'-O-methyluridine-3'-phosphate
  modified_base 5: mod_base = OTHER; note = 2'-O-methyluridine-3'-phosphate
  modified_base 6: mod_base = OTHER; note = 2'-fluorocytidine-3'-phosphate
  modified_base 7: mod_base = OTHER; note = 2'-O-methyladenosine-3'-phosphate
  modified_base 8: mod_base = OTHER; note = 2'-O-methylguanosine-3'-phosphate
  modified_base 9: mod_base = OTHER; note = 2'-O-methylcytidine-3'-phosphate
  modified_base 10: mod_base = OTHER; note = 2'-O-methyladenosine-3'-phosphate
  modified_base 11: mod_base = OTHER; note = 2'-O-methyluridine-3'-phosphate
  modified_base 12: mod_base = OTHER; note = 2'-O-methyluridine-3'-phosphate
  modified_base 13: mod_base = OTHER; note = 2'-O-methylcytidine-3'-phosphate
  modified_base 14: mod_base = OTHER; note = 2'-fluorouridine-3'-phosphate
  modified_base 15: mod_base = OTHER; note = 2'-O-methylguanosine-3'-phosphate
  modified_base 16: mod_base = OTHER; note = 2'-fluoroadenosine-3'-phosphate
  modified_base 17: mod_base = OTHER; note = 2'-O-methyluridine-3'-phosphate
  modified_base 18: mod_base = OTHER; note = 2'-O-methylcytidine-3'-phosphate
  modified_base 19: mod_base = OTHER; note = 2'-O-methyluridine-3'-phosphate
  modified_base 20: mod_base = OTHER; note = 2'-O-methylcytidine-3'-phosphate
  modified_base 21: mod_base = OTHER; note = 2'-O-methylcytidine-3'-phosphorothioate
  modified_base 22: mod_base = OTHER; note = 2'-O-methyluridine-3'-phosphorothioate
  modified_base 23: mod_base = OTHER; note = 2'-O-methyluridine-3'-phosphate
ttcttcagcattctgatctcctt

SEQ ID NO: 315 - RNA, 23 nt, synthetic construct
  source 1..23: mol_type = other RNA
  modified_base 1: mod_base = OTHER; note = 2'-O-methyluridine-3'-phosphorothioate
  modified_base 2: mod_base = OTHER; note = 2'-fluorouridine-3'-phosphorothioate
  modified_base 3: mod_base = OTHER; note = 2'-O-methylcytidine-3'-phosphate
  modified_base 4: mod_base = OTHER; note = 2'-O-methyluridine-3'-phosphate
  modified_base 5: mod_base = OTHER; note = 2'-O-methylguanosine-3'-phosphate
  modified_base 6: mod_base = OTHER; note = 2'-fluorouridine-3'-phosphate
  modified_base 7: mod_base = OTHER; note = 2'-O-methylguanosine-3'-phosphate
  modified_base 8: mod_base = OTHER; note = 2'-O-methyluridine-3'-phosphate
  modified_base 9: mod_base = OTHER; note = 2'-O-methyluridine-3'-phosphate
  modified_base 10: mod_base = OTHER; note = 2'-O-methylguanosine-3'-phosphate
  modified_base 11: mod_base = OTHER; note = 2'-O-methyluridine-3'-phosphate
  modified_base 12: mod_base = OTHER; note = 2'-O-methyladenosine-3'-phosphate
  modified_base 13: mod_base = OTHER; note = 2'-O-methyluridine-3'-phosphate
  modified_base 14: mod_base = OTHER; note = 2'-fluoroguanosine-3'-phosphate
  modified_base 15: mod_base = OTHER; note = 2'-O-methyluridine-3'-phosphate
  modified_base 16: mod_base = OTHER; note = 2'-fluoroguanosine-3'-phosphate
  modified_base 17: mod_base = OTHER; note = 2'-O-methylcytidine-3'-phosphate
  modified_base 18: mod_base = OTHER; note = 2'-O-methyladenosine-3'-phosphate
  modified_base 19: mod_base = OTHER; note = 2'-O-methyluridine-3'-phosphate
  modified_base 20: mod_base = OTHER; note = 2'-O-methylguanosine-3'-phosphate
  modified_base 21: mod_base = OTHER; note = 2'-O-methyladenosine-3'-phosphorothioate
  modified_base 22: mod_base = OTHER; note = 2'-O-methyluridine-3'-phosphorothioate
  modified_base 23: mod_base = OTHER; note = 2'-O-methyluridine-3'-phosphate
ttctgtgttgtatgtgcatgatt

SEQ ID NO: 316 - RNA, 23 nt, synthetic construct
  source 1..23: mol_type = other RNA
  modified_base 1: mod_base = OTHER; note = 2'-O-methyluridine-3'-phosphorothioate
  modified_base 2: mod_base = OTHER; note = 2'-fluorouridine-3'-phosphorothioate
  modified_base 3: mod_base = OTHER; note = 2'-O-methylcytidine-3'-phosphate
  modified_base 4: mod_base = OTHER; note = 2'-O-methyluridine-3'-phosphate
  modified_base 5: mod_base = OTHER; note = 2'-O-methylguanosine-3'-phosphate
  modified_base 6: mod_base = OTHER; note = 2'-fluorouridine-3'-phosphate
  modified_base 7: mod_base = OTHER; note = 2'-O-methylguanosine-3'-phosphate
  modified_base 8: mod_base = OTHER; note = 2'-O-methyluridine-3'-phosphate
  modified_base 9: mod_base = OTHER; note = 2'-O-methyluridine-3'-phosphate
  modified_base 10: mod_base = OTHER; note = 2'-O-methylguanosine-3'-phosphate
  modified_base 11: mod_base = OTHER; note = 2'-O-methyluridine-3'-phosphate
  modified_base 12: mod_base = OTHER; note = 2'-O-methyladenosine-3'-phosphate
  modified_base 13: mod_base = OTHER; note = 2'-O-methyluridine-3'-phosphate
  modified_base 14: mod_base = OTHER; note = 2'-fluoroguanosine-3'-phosphate
  modified_base 15: mod_base = OTHER; note = 2'-O-methyluridine-3'-phosphate
  modified_base 16: mod_base = OTHER; note = 2'-fluoroguanosine-3'-phosphate
  modified_base 17: mod_base = OTHER; note = 2'-O-methylcytidine-3'-phosphate
  modified_base 18: mod_base = OTHER; note = 2'-O-methyladenosine-3'-phosphate
  modified_base 19: mod_base = OTHER; note = 2'-O-methylcytidine-3'-phosphate
  modified_base 20: mod_base = OTHER; note = 2'-O-methylguanosine-3'-phosphate
  modified_base 21: mod_base = OTHER; note = 2'-O-methyladenosine-3'-phosphorothioate
  modified_base 22: mod_base = OTHER; note = 2'-O-methyluridine-3'-phosphorothioate
  modified_base 23: mod_base = OTHER; note = 2'-O-methyluridine-3'-phosphate
ttctgtgttgtatgtgcacgatt

SEQ ID NO: 317 - RNA, 23 nt, synthetic construct
  source 1..23: mol_type = other RNA
  modified_base 1: mod_base = OTHER; note = 2'-O-methyluridine-3'-phosphorothioate
  modified_base 2: mod_base = OTHER; note = 2'-fluorouridine-3'-phosphorothioate
  modified_base 3: mod_base = OTHER; note = 2'-O-methylcytidine-3'-phosphate
  modified_base 4: mod_base = OTHER; note = 2'-O-methyluridine-3'-phosphate
  modified_base 5: mod_base = OTHER; note = 2'-O-methylguanosine-3'-phosphate
  modified_base 6: mod_base = OTHER; note = 2'-fluorouridine-3'-phosphate
  modified_base 7: mod_base = OTHER; note = 2'-O-methylguanosine-3'-phosphate
  modified_base 8: mod_base = OTHER; note = 2'-O-methyluridine-3'-phosphate
  modified_base 9: mod_base = OTHER; note = 2'-O-methyluridine-3'-phosphate
  modified_base 10: mod_base = OTHER; note = 2'-O-methylguanosine-3'-phosphate
  modified_base 11: mod_base = OTHER; note = 2'-O-methyluridine-3'-phosphate
  modified_base 12: mod_base = OTHER; note = 2'-O-methyladenosine-3'-phosphate
  modified_base 13: mod_base = OTHER; note = 2'-O-methyluridine-3'-phosphate
  modified_base 14: mod_base = OTHER; note = 2'-fluoroguanosine-3'-phosphate
  modified_base 15: mod_base = OTHER; note = 2'-O-methyluridine-3'-phosphate
  modified_base 16: mod_base = OTHER; note = 2'-fluoroadenosine-3'-phosphate
  modified_base 17: mod_base = OTHER; note = 2'-O-methylcytidine-3'-phosphate
  modified_base 18: mod_base = OTHER; note = 2'-O-methyladenosine-3'-phosphate
  modified_base 19: mod_base = OTHER; note = 2'-O-methylguanosine-3'-phosphate
  modified_base 20: mod_base = OTHER; note = 2'-O-methylguanosine-3'-phosphate
  modified_base 21: mod_base = OTHER; note = 2'-O-methyladenosine-3'-phosphorothioate
  modified_base 22: mod_base = OTHER; note = 2'-O-methyluridine-3'-phosphorothioate
  modified_base 23: mod_base = OTHER; note = 2'-O-methyluridine-3'-phosphate
ttctgtgttgtatgtacaggatt

SEQ ID NO: 318 - RNA, 23 nt, synthetic construct
  source 1..23: mol_type = other RNA
  modified_base 1: mod_base = OTHER; note = 2'-O-methyluridine-3'-phosphorothioate
  modified_base 2: mod_base = OTHER; note = 2'-fluorouridine-3'-phosphorothioate
  modified_base 3: mod_base = OTHER; note = 2'-O-methylcytidine-3'-phosphate
  modified_base 4: mod_base = OTHER; note = 2'-O-methylcytidine-3'-phosphate
  modified_base 5: mod_base = OTHER; note = 2'-O-methylguanosine-3'-phosphate
  modified_base 6: mod_base = OTHER; note = 2'-fluorouridine-3'-phosphate
  modified_base 7: mod_base = OTHER; note = 2'-O-methylguanosine-3'-phosphate
  modified_base 8: mod_base = OTHER; note = 2'-O-methyluridine-3'-phosphate
  modified_base 9: mod_base = OTHER; note = 2'-O-methyluridine-3'-phosphate
  modified_base 10: mod_base = OTHER; note = 2'-O-methylguanosine-3'-phosphate
  modified_base 11: mod_base = OTHER; note = 2'-O-methyluridine-3'-phosphate
  modified_base 12: mod_base = OTHER; note = 2'-O-methyladenosine-3'-phosphate
  modified_base 13: mod_base = OTHER; note = 2'-O-methylcytidine-3'-phosphate
  modified_base 14: mod_base = OTHER; note = 2'-fluoroguanosine-3'-phosphate
  modified_base 15: mod_base = OTHER; note = 2'-O-methyluridine-3'-phosphate
  modified_base 16: mod_base = OTHER; note = 2'-fluoroguanosine-3'-phosphate
  modified_base 17: mod_base = OTHER; note = 2'-O-methylcytidine-3'-phosphate
  modified_base 18: mod_base = OTHER; note = 2'-O-methyladenosine-3'-phosphate
  modified_base 19: mod_base = OTHER; note = 2'-O-methylguanosine-3'-phosphate
  modified_base 20: mod_base = OTHER; note = 2'-O-methylguanosine-3'-phosphate
  modified_base 21: mod_base = OTHER; note = 2'-O-methyladenosine-3'-phosphorothioate
  modified_base 22: mod_base = OTHER; note = 2'-O-methyluridine-3'-phosphorothioate
  modified_base 23: mod_base = OTHER; note = 2'-O-methyluridine-3'-phosphate
ttccgtgttgtacgtgcaggatt

SEQ ID NO: 319 - RNA, 23 nt, synthetic construct
  source 1..23: mol_type = other RNA
  modified_base 1: mod_base = OTHER; note = 2'-O-methyluridine-3'-phosphorothioate
  modified_base 2: mod_base = OTHER; note = 2'-fluorouridine-3'-phosphorothioate
  modified_base 3: mod_base = OTHER; note = 2'-O-methylcytidine-3'-phosphate
  modified_base 4: mod_base = OTHER; note = 2'-O-methyluridine-3'-phosphate
  modified_base 5: mod_base = OTHER; note = 2'-O-methylguanosine-3'-phosphate
  modified_base 6: mod_base = OTHER; note = 2'-fluorouridine-3'-phosphate
  modified_base 7: mod_base = OTHER; note = 2'-O-methylguanosine-3'-phosphate
  modified_base 8: mod_base = OTHER; note = 2'-O-methyluridine-3'-phosphate
  modified_base 9: mod_base = OTHER; note = 2'-O-methyluridine-3'-phosphate
  modified_base 10: mod_base = OTHER; note = 2'-O-methylguanosine-3'-phosphate
  modified_base 11: mod_base = OTHER; note = 2'-O-methyluridine-3'-phosphate
  modified_base 12: mod_base = OTHER; note = 2'-O-methyladenosine-3'-phosphate
  modified_base 13: mod_base = OTHER; note = 2'-O-methylcytidine-3'-phosphate
  modified_base 14: mod_base = OTHER; note = 2'-fluoroguanosine-3'-phosphate
  modified_base 15: mod_base = OTHER; note = 2'-O-methyluridine-3'-phosphate
  modified_base 16: mod_base = OTHER; note = 2'-fluoroadenosine-3'-phosphate
  modified_base 17: mod_base = OTHER; note = 2'-O-methylcytidine-3'-phosphate
  modified_base 18: mod_base = OTHER; note = 2'-O-methyladenosine-3'-phosphate
  modified_base 19: mod_base = OTHER; note = 2'-O-methylguanosine-3'-phosphate
  modified_base 20: mod_base = OTHER; note = 2'-O-methylguanosine-3'-phosphate
  modified_base 21: mod_base = OTHER; note = 2'-O-methyladenosine-3'-phosphorothioate
  modified_base 22: mod_base = OTHER; note = 2'-O-methyluridine-3'-phosphorothioate
  modified_base 23: mod_base = OTHER; note = 2'-O-methyluridine-3'-phosphate
ttctgtgttgtacgtacaggatt

SEQ ID NO: 320 - RNA, 23 nt, synthetic construct
  source 1..23: mol_type = other RNA
  modified_base 1: mod_base = OTHER; note = 2'-O-methyluridine-3'-phosphorothioate
  modified_base 2: mod_base = OTHER; note = 2'-fluorouridine-3'-phosphorothioate
  modified_base 3: mod_base = OTHER; note = 2'-O-methylcytidine-3'-phosphate
  modified_base 4: mod_base = OTHER; note = 2'-O-methylcytidine-3'-phosphate
  modified_base 5: mod_base = OTHER; note = 2'-O-methylguanosine-3'-phosphate
  modified_base 6: mod_base = OTHER; note = 2'-fluorouridine-3'-phosphate
  modified_base 7: mod_base = OTHER; note = 2'-O-methylguanosine-3'-phosphate
  modified_base 8: mod_base = OTHER; note = 2'-O-methyluridine-3'-phosphate
  modified_base 9: mod_base = OTHER; note = 2'-O-methyluridine-3'-phosphate
  modified_base 10: mod_base = OTHER; note = 2'-O-methylguanosine-3'-phosphate
  modified_base 11: mod_base = OTHER; note = 2'-O-methyluridine-3'-phosphate
  modified_base 12: mod_base = OTHER; note = 2'-O-methyladenosine-3'-phosphate
  modified_base 13: mod_base = OTHER; note = 2'-O-methyluridine-3'-phosphate
  modified_base 14: mod_base = OTHER; note = 2'-fluoroguanosine-3'-phosphate
  modified_base 15: mod_base = OTHER; note = 2'-O-methyluridine-3'-phosphate
  modified_base 16: mod_base = OTHER; note = 2'-fluoroguanosine-3'-phosphate
  modified_base 17: mod_base = OTHER; note = 2'-O-methylcytidine-3'-phosphate
  modified_base 18: mod_base = OTHER; note = 2'-O-methyladenosine-3'-phosphate
  modified_base 19: mod_base = OTHER; note = 2'-O-methyladenosine-3'-phosphate
  modified_base 20: mod_base = OTHER; note = 2'-O-methylguanosine-3'-phosphate
  modified_base 21: mod_base = OTHER; note = 2'-O-methyladenosine-3'-phosphorothioate
  modified_base 22: mod_base = OTHER; note = 2'-O-methyluridine-3'-phosphorothioate
  modified_base 23: mod_base = OTHER; note = 2'-O-methyluridine-3'-phosphate
ttccgtgttgtatgtgcaagatt

SEQ ID NO: 321 - RNA, 23 nt, synthetic construct
  source 1..23: mol_type = other RNA
  modified_base 1: mod_base = OTHER; note = 2'-O-methyluridine-3'-phosphorothioate
  modified_base 2: mod_base = OTHER; note = 2'-fluorouridine-3'-phosphorothioate
  modified_base 3: mod_base = OTHER; note = 2'-O-methylcytidine-3'-phosphate
  modified_base 4: mod_base = OTHER; note = 2'-O-methylcytidine-3'-phosphate
  modified_base 5: mod_base = OTHER; note = 2'-O-methyladenosine-3'-phosphate
  modified_base 6: mod_base = OTHER; note = 2'-fluorocytidine-3'-phosphate
  modified_base 7: mod_base = OTHER; note = 2'-O-methyluridine-3'-phosphate
  modified_base 8: mod_base = OTHER; note = 2'-O-methylcytidine-3'-phosphate
  modified_base 9: mod_base = OTHER; note = 2'-O-methyladenosine-3'-phosphate
  modified_base 10: mod_base = OTHER; note = 2'-O-methylcytidine-3'-phosphate
  modified_base 11: mod_base = OTHER; note = 2'-O-methylcytidine-3'-phosphate
  modified_base 12: mod_base = OTHER; note = 2'-O-methylcytidine-3'-phosphate
  modified_base 13: mod_base = OTHER; note = 2'-O-methylguanosine-3'-phosphate
  modified_base 14: mod_base = OTHER; note = 2'-fluoroguanosine-3'-phosphate
  modified_base 15: mod_base = OTHER; note = 2'-O-methylguanosine-3'-phosphate
  modified_base 16: mod_base = OTHER; note = 2'-fluoroadenosine-3'-phosphate
  modified_base 17: mod_base = OTHER; note = 2'-O-methyladenosine-3'-phosphate
  modified_base 18: mod_base = OTHER; note = 2'-O-methylguanosine-3'-phosphate
  modified_base 19: mod_base = OTHER; note = 2'-O-methylcytidine-3'-phosphate
  modified_base 20: mod_base = OTHER; note = 2'-O-methylguanosine-3'-phosphate
  modified_base 21: mod_base = OTHER; note = 2'-O-methylguanosine-3'-phosphorothioate
  modified_base 22: mod_base = OTHER; note = 2'-O-methyluridine-3'-phosphorothioate
  modified_base 23: mod_base = OTHER; note = 2'-O-methyluridine-3'-phosphate
ttccactcacccgggaagcggtt

SEQ ID NO: 322 - RNA, 23 nt, synthetic construct
  source 1..23: mol_type = other RNA
  modified_base 1: mod_base = OTHER; note = 2'-O-methyluridine-3'-phosphorothioate
  modified_base 2: mod_base = OTHER; note = 2'-fluorouridine-3'-phosphorothioate
  modified_base 3: mod_base = OTHER; note = 2'-O-methylcytidine-3'-phosphate
  modified_base 4: mod_base = OTHER; note = 2'-O-methylcytidine-3'-phosphate
  modified_base 5: mod_base = OTHER; note = 2'-O-methyladenosine-3'-phosphate
  modified_base 6: mod_base = OTHER; note = 2'-fluoroguanosine-3'-phosphate
  modified_base 7: mod_base = OTHER; note = 2'-O-methyluridine-3'-phosphate
  modified_base 8: mod_base = OTHER; note = 2'-O-methyluridine-3'-phosphate
  modified_base 9: mod_base = OTHER; note = 2'-O-methyladenosine-3'-phosphate
  modified_base 10: mod_base = OTHER; note = 2'-O-methylcytidine-3'-phosphate
  modified_base 11: mod_base = OTHER; note = 2'-O-methylcytidine-3'-phosphate
  modified_base 12: mod_base = OTHER; note = 2'-O-methylcytidine-3'-phosphate
  modified_base 13: mod_base = OTHER; note = 2'-O-methylguanosine-3'-phosphate
  modified_base 14: mod_base = OTHER; note = 2'-fluoroguanosine-3'-phosphate
  modified_base 15: mod_base = OTHER; note = 2'-O-methylguanosine-3'-phosphate
  modified_base 16: mod_base = OTHER; note = 2'-fluoroadenosine-3'-phosphate
  modified_base 17: mod_base = OTHER; note = 2'-O-methyladenosine-3'-phosphate
  modified_base 18: mod_base = OTHER; note = 2'-O-methylguanosine-3'-phosphate
  modified_base 19: mod_base = OTHER; note = 2'-O-methylcytidine-3'-phosphate
  modified_base 20: mod_base = OTHER; note = 2'-O-methylguanosine-3'-phosphate
  modified_base 21: mod_base = OTHER; note = 2'-O-methylguanosine-3'-phosphorothioate
  modified_base 22: mod_base = OTHER; note = 2'-O-methyluridine-3'-phosphorothioate
  modified_base 23: mod_base = OTHER; note = 2'-O-methyluridine-3'-phosphate
ttccagttacccgggaagcggtt

SEQ ID NO: 323 - RNA, 23 nt, synthetic construct
  source 1..23: mol_type = other RNA
  modified_base 1: mod_base = OTHER; note = 2'-O-methyluridine-3'-phosphorothioate
  modified_base 2: mod_base = OTHER; note = 2'-fluorouridine-3'-phosphorothioate
  modified_base 3: mod_base = OTHER; note = 2'-O-methylcytidine-3'-phosphate
  modified_base 4: mod_base = OTHER; note = 2'-O-methylcytidine-3'-phosphate
  modified_base 5: mod_base = OTHER; note = 2'-O-methyladenosine-3'-phosphate
  modified_base 6: mod_base = OTHER; note = 2'-fluorouridine-3'-phosphate
  modified_base 7: mod_base = OTHER; note = 2'-O-methyluridine-3'-phosphate
  modified_base 8: mod_base = OTHER; note = 2'-O-methyluridine-3'-phosphate
  modified_base 9: mod_base = OTHER; note = 2'-O-methyladenosine-3'-phosphate
  modified_base 10: mod_base = OTHER; note = 2'-O-methylcytidine-3'-phosphate
  modified_base 11: mod_base = OTHER; note = 2'-O-methylcytidine-3'-phosphate
  modified_base 12: mod_base = OTHER; note = 2'-O-methylcytidine-3'-phosphate
  modified_base 13: mod_base = OTHER; note = 2'-O-methylguanosine-3'-phosphate
  modified_base 14: mod_base = OTHER; note = 2'-fluoroguanosine-3'-phosphate
  modified_base 15: mod_base = OTHER; note = 2'-O-methylguanosine-3'-phosphate
  modified_base 16: mod_base = OTHER; note = 2'-fluoroadenosine-3'-phosphate
  modified_base 17: mod_base = OTHER; note = 2'-O-methyladenosine-3'-phosphate
  modified_base 18: mod_base = OTHER; note = 2'-O-methylguanosine-3'-phosphate
  modified_base 19: mod_base = OTHER; note = 2'-O-methylcytidine-3'-phosphate
  modified_base 20: mod_base = OTHER; note = 2'-O-methylguanosine-3'-phosphate
  modified_base 21: mod_base = OTHER; note = 2'-O-methylguanosine-3'-phosphorothioate
  modified_base 22: mod_base = OTHER; note = 2'-O-methyluridine-3'-phosphorothioate
  modified_base 23: mod_base = OTHER; note = 2'-O-methyluridine-3'-phosphate
ttccatttacccgggaagcggtt

SEQ ID NO: 324 - RNA, 23 nt, synthetic construct
  source 1..23: mol_type = other RNA
  modified_base 1: mod_base = OTHER; note = 2'-O-methyluridine-3'-phosphorothioate
  modified_base 2: mod_base = OTHER; note = 2'-fluorouridine-3'-phosphorothioate
  modified_base 3: mod_base = OTHER; note = 2'-O-methylcytidine-3'-phosphate
  modified_base 4: mod_base = OTHER; note = 2'-O-methylcytidine-3'-phosphate
  modified_base 5: mod_base = OTHER; note = 2'-O-methyladenosine-3'-phosphate
  modified_base 6: mod_base = OTHER; note = 2'-fluorouridine-3'-phosphate
  modified_base 7: mod_base = OTHER; note = 2'-O-methyluridine-3'-phosphate
  modified_base 8: mod_base = OTHER; note = 2'-O-methylcytidine-3'-phosphate
  modified_base 9: mod_base = OTHER; note = 2'-O-methyladenosine-3'-phosphate
  modified_base 10: mod_base = OTHER; note = 2'-O-methylcytidine-3'-phosphate
  modified_base 11: mod_base = OTHER; note = 2'-O-methylcytidine-3'-phosphate
  modified_base 12: mod_base = OTHER; note = 2'-O-methylcytidine-3'-phosphate
  modified_base 13: mod_base = OTHER; note = 2'-O-methyluridine-3'-phosphate
  modified_base 14: mod_base = OTHER; note = 2'-fluoroguanosine-3'-phosphate
  modified_base 15: mod_base = OTHER; note = 2'-O-methylguanosine-3'-phosphate
  modified_base 16: mod_base = OTHER; note = 2'-fluoroadenosine-3'-phosphate
  modified_base 17: mod_base = OTHER; note = 2'-O-methyladenosine-3'-phosphate
  modified_base 18: mod_base = OTHER; note = 2'-O-methyluridine-3'-phosphate
  modified_base 19: mod_base = OTHER; note = 2'-O-methylcytidine-3'-phosphate
  modified_base 20: mod_base = OTHER; note = 2'-O-methylguanosine-3'-phosphate
  modified_base 21: mod_base = OTHER; note = 2'-O-methylcytidine-3'-phosphorothioate
  modified_base 22: mod_base = OTHER; note = 2'-O-methyluridine-3'-phosphorothioate
  modified_base 23: mod_base = OTHER; note = 2'-O-methyluridine-3'-phosphate
ttccattcaccctggaatcgctt

SEQ ID NO: 325 - RNA, 23 nt, synthetic construct
  source 1..23: mol_type = other RNA
  modified_base 1: mod_base = OTHER; note = 2'-O-methyluridine-3'-phosphorothioate
  modified_base 2: mod_base = OTHER; note = 2'-fluorouridine-3'-phosphorothioate
  modified_base 3: mod_base = OTHER; note = 2'-O-methylcytidine-3'-phosphate
  modified_base 4: mod_base = OTHER; note = 2'-O-methylcytidine-3'-phosphate
  modified_base 5: mod_base = OTHER; note = 2'-O-methyladenosine-3'-phosphate
  modified_base 6: mod_base = OTHER; note = 2'-fluorouridine-3'-phosphate
  modified_base 7: mod_base = OTHER; note = 2'-O-methyluridine-3'-phosphate
  modified_base 8: mod_base = OTHER; note = 2'-O-methylcytidine-3'-phosphate
  modified_base 9: mod_base = OTHER; note = 2'-O-methyladenosine-3'-phosphate
  modified_base 10: mod_base = OTHER; note = 2'-O-methylcytidine-3'-phosphate
  modified_base 11: mod_base = OTHER; note = 2'-O-methylcytidine-3'-phosphate
  modified_base 12: mod_base = OTHER; note = 2'-O-methylcytidine-3'-phosphate
  modified_base 13: mod_base = OTHER; note = 2'-O-methylguanosine-3'-phosphate
  modified_base 14: mod_base = OTHER; note = 2'-fluoroguanosine-3'-phosphate
  modified_base 15: mod_base = OTHER; note = 2'-O-methylguanosine-3'-phosphate
  modified_base 16: mod_base = OTHER; note = 2'-fluoroadenosine-3'-phosphate
  modified_base 17: mod_base = OTHER; note = 2'-O-methyladenosine-3'-phosphate
  modified_base 18: mod_base = OTHER; note = 2'-O-methylguanosine-3'-phosphate
  modified_base 19: mod_base = OTHER; note = 2'-O-methylcytidine-3'-phosphate
  modified_base 20: mod_base = OTHER; note = 2'-O-methylguanosine-3'-phosphate
  modified_base 21: mod_base = OTHER; note = 2'-O-methylguanosine-3'-phosphorothioate
  modified_base 22: mod_base = OTHER; note = 2'-O-methyluridine-3'-phosphorothioate
  modified_base 23: mod_base = OTHER; note = 2'-O-methyluridine-3'-phosphate
ttccattcacccgggaagcggtt

SEQ ID NO: 326 - RNA, 23 nt, synthetic construct
  source 1..23: mol_type = other RNA
  modified_base 1: mod_base = OTHER; note = 2'-O-methyluridine-3'-phosphorothioate
  modified_base 2: mod_base = OTHER; note = 2'-fluorouridine-3'-phosphorothioate
  modified_base 3: mod_base = OTHER; note = 2'-O-methylcytidine-3'-phosphate
  modified_base 4: mod_base = OTHER; note = 2'-O-methylcytidine-3'-phosphate
  modified_base 5: mod_base = OTHER; note = 2'-O-methyladenosine-3'-phosphate
  modified_base 6: mod_base = OTHER; note = 2'-fluorocytidine-3'-phosphate
  modified_base 7: mod_base = OTHER; note = 2'-O-methyluridine-3'-phosphate
  modified_base 8: mod_base = OTHER; note = 2'-O-methylcytidine-3'-phosphate
  modified_base 9: mod_base = OTHER; note = 2'-O-methylguanosine-3'-phosphate
  modified_base 10: mod_base = OTHER; note = 2'-O-methylcytidine-3'-phosphate
  modified_base 11: mod_base = OTHER; note = 2'-O-methylcytidine-3'-phosphate
  modified_base 12: mod_base = OTHER; note = 2'-O-methylcytidine-3'-phosphate
  modified_base 13: mod_base = OTHER; note = 2'-O-methyluridine-3'-phosphate
  modified_base 14: mod_base = OTHER; note = 2'-fluoroguanosine-3'-phosphate
  modified_base 15: mod_base = OTHER; note = 2'-O-methylguanosine-3'-phosphate
  modified_base 16: mod_base = OTHER; note = 2'-fluoroadenosine-3'-phosphate
  modified_base 17: mod_base = OTHER; note = 2'-O-methyladenosine-3'-phosphate
  modified_base 18: mod_base = OTHER; note = 2'-O-methylguanosine-3'-phosphate
  modified_base 19: mod_base = OTHER; note = 2'-O-methylcytidine-3'-phosphate
  modified_base 20: mod_base = OTHER; note = 2'-O-methylguanosine-3'-phosphate
  modified_base 21: mod_base = OTHER; note = 2'-O-methylguanosine-3'-phosphorothioate
  modified_base 22: mod_base = OTHER; note = 2'-O-methyluridine-3'-phosphorothioate
  modified_base 23: mod_base = OTHER; note = 2'-O-methyluridine-3'-phosphate
ttccactcgccctggaagcggtt

SEQ ID NO: 327 - RNA, 21 nt, Macaca mulatta
  source 1..21: mol_type = mRNA
ttcaacatgcggatctcctgg

SEQ ID NO: 328 - RNA, 21 nt, Mus musculus
  source 1..21: mol_type = mRNA
ttcagcattctgatctcctgg

SEQ ID NO: 329 - RNA, 21 nt, Rattus norvegicus
  source 1..21: mol_type = mRNA
ttcagcattctgatctcctga

SEQ ID NO: 330 - RNA, 21 nt, Macaca mulatta
  source 1..21: mol_type = mRNA
ttcttcaacatgcggatctcc

SEQ ID NO: 331 - RNA, 21 nt, Felis catus
  source 1..21: mol_type = mRNA
ttccattcaccctggaagcgg

SEQ ID NO: 332 - RNA, 21 nt, Mus musculus
  source 1..21: mol_type = mRNA
ttcttcagcattctgatctcc

SEQ ID NO: 333 - RNA, 21 nt, Mus musculus
  source 1..21: mol_type = mRNA
ttctgtgttgtatgtgcatga

SEQ ID NO: 334 - RNA, 21 nt, Rattus norvegicus
  source 1..21: mol_type = mRNA
ttctgtgttgtatgtgcacga

SEQ ID NO: 335 - RNA, 21 nt, Canis lupus
  source 1..21: mol_type = mRNA; sub_species = familiaris
ttctgtgttgtatgtacagga

SEQ ID NO: 336 - RNA, 21 nt, Macaca mulatta
  source 1..21: mol_type = mRNA
ttccgtgttgtacgtgcagga

SEQ ID NO: 337 - RNA, 21 nt, Felis catus
  source 1..21: mol_type = mRNA
ttctgtgttgtacgtacagga

SEQ ID NO: 338 - RNA, 21 nt, Equus caballus
  source 1..21: mol_type = mRNA
ttccgtgttgtacgtgcagga

SEQ ID NO: 339 - RNA, 21 nt, Bos taurus
  source 1..21: mol_type = mRNA
ttccgtgttgtatgtgcaaga

SEQ ID NO: 340 - RNA, 21 nt, Mus musculus
  source 1..21: mol_type = mRNA
ttccactcacccgggaagcgg

SEQ ID NO: 341 - RNA, 21 nt, Rattus norvegicus
  source 1..21: mol_type = mRNA
ttccagttacccgggaagcgg

SEQ ID NO: 342 - RNA, 21 nt, Canis lupus
  source 1..21: mol_type = mRNA; sub_species = familiaris
tcccatttacccgggaagcgg

SEQ ID NO: 343 - RNA, 21 nt, Equus caballus
  source 1..21: mol_type = mRNA
ttccattcaccctggaatcgc

SEQ ID NO: 344 - RNA, 21 nt, Mus musculus
  source 1..21: mol_type = mRNA
ttccattcacccgggaagcgg

SEQ ID NO: 345 - RNA, 21 nt, Bos taurus
  source 1..21: mol_type = mRNA
ttccactcgccctggaagcgg

SEQ ID NO: 346 - RNA, 21 nt, Mus musculus
  source 1..21: mol_type = mRNA
ccgcttcccgggtgagtggaa

SEQ ID NO: 347 - RNA, 21 nt, Rattus norvegicus
  source 1..21: mol_type = mRNA
ccgcttcccgggtaactggaa

SEQ ID NO: 348 - RNA, 15 nt, synthetic construct
  source 1..15: mol_type = other RNA
  modified_base 1: mod_base = OTHER; note = 2'-fluorocytidine-3'-phosphorothioate
  modified_base 2: mod_base = OTHER; note = 2'-O-methylcytidine-3'-phosphorothioate
  modified_base 3: mod_base = OTHER; note = 2'-fluorocytidine-3'-phosphate
  modified_base 4: mod_base = OTHER; note = 2'-O-methylguanosine-3'-phosphate
  modified_base 5: mod_base = OTHER; note = 2'-fluoroguanosine-3'-phosphate
  modified_base 6: mod_base = OTHER; note = 2'-O-methylguanosine-3'-phosphate
  modified_base 7: mod_base = OTHER; note = 2'-fluorouridine-3'-phosphate
  modified_base 8: mod_base = OTHER; note = 2'-O-methylguanosine-3'-phosphate
  modified_base 9: mod_base = OTHER; note = 2'-fluoroadenosine-3'-phosphate
  modified_base 10: mod_base = OTHER; note = 2'-O-methyladenosine-3'-phosphate
  modified_base 11: mod_base = OTHER; note = 2'-fluorouridine-3'-phosphate
  modified_base 12: mod_base = OTHER; note = 2'-O-methylguanosine-3'-phosphate
  modified_base 13: mod_base = OTHER; note = 2'-fluoroguanosine-3'-phosphorothioate
  modified_base 14: mod_base = OTHER; note = 2'-O-methyladenosine-3'-phosphorothioate
  modified_base 15: mod_base = OTHER; note = 2'-fluoroadenosine-3'-phosphate
cccgggtgaatggaa

SEQ ID NO: 349 - RNA, 15 nt, synthetic construct
  source 1..15: mol_type = other RNA
  modified_base 1: mod_base = OTHER; note = 2'-fluorocytidine-3'-phosphorothioate
  modified_base 2: mod_base = OTHER; note = 2'-O-methylcytidine-3'-phosphorothioate
  modified_base 3: mod_base = OTHER; note = 2'-fluorocytidine-3'-phosphate
  modified_base 4: mod_base = OTHER; note = 2'-O-methylguanosine-3'-phosphate
  modified_base 5: mod_base = OTHER; note = 2'-fluoroguanosine-3'-phosphate
  modified_base 6: mod_base = OTHER; note = 2'-O-methylguanosine-3'-phosphate
  modified_base 7: mod_base = OTHER; note = 2'-fluorouridine-3'-phosphate
  modified_base 8: mod_base = OTHER; note = 2'-O-methyladenosine-3'-phosphate
  modified_base 9: mod_base = OTHER; note = 2'-fluoroadenosine-3'-phosphate
  modified_base 10: mod_base = OTHER; note = 2'-O-methyladenosine-3'-phosphate
  modified_base 11: mod_base = OTHER; note = 2'-fluorouridine-3'-phosphate
  modified_base 12: mod_base = OTHER; note = 2'-O-methylguanosine-3'-phosphate
  modified_base 13: mod_base = OTHER; note = 2'-fluoroguanosine-3'-phosphorothioate
  modified_base 14: mod_base = OTHER; note = 2'-O-methylguanosine-3'-phosphorothioate
  modified_base 15: mod_base = OTHER; note = 2'-fluoroadenosine-3'-phosphate
cccgggtaaatggga

SEQ ID NO: 350 - RNA, 21 nt, synthetic construct
  source 1..21: mol_type = other RNA
  modified_base 1: mod_base = OTHER; note = 2'-O-methyluridine-3'-phosphorothioate
  modified_base 2: mod_base = OTHER; note = 2'-fluorouridine-3'-phosphorothioate
  modified_base 3: mod_base = OTHER; note = 2'-O-methylcytidine-3'-phosphate
  modified_base 4: mod_base = OTHER; note = 2'-fluorouridine-3'-phosphate
  modified_base 5: mod_base = OTHER; note = 2'-O-methylguanosine-3'-phosphate
  modified_base 6: mod_base = OTHER; note = 2'-fluorouridine-3'-phosphate
  modified_base 7: mod_base = OTHER; note = 2'-O-methylguanosine-3'-phosphate
  modified_base 8: mod_base = OTHER; note = 2'-fluorouridine-3'-phosphate
  modified_base 9: mod_base = OTHER; note = 2'-O-methyluridine-3'-phosphate
  modified_base 10: mod_base = OTHER; note = 2'-fluoroguanosine-3'-phosphate
  modified_base 11: mod_base = OTHER; note = 2'-O-methyluridine-3'-phosphate
  modified_base 12: mod_base = OTHER; note = 2'-fluoroadenosine-3'-phosphate
  modified_base 13: mod_base = OTHER; note = 2'-O-methyluridine-3'-phosphate
  modified_base 14: mod_base = OTHER; note = 2'-fluoroguanosine-3'-phosphorothioate
  modified_base 15: mod_base = OTHER; note = 2'-O-methyluridine-3'-phosphorothioate
  modified_base 16: mod_base = OTHER; note = 2'-fluoroguanosine-3'-phosphorothioate
  modified_base 17: mod_base = OTHER; note = 2'-O-methylcytidine-3'-phosphorothioate
  modified_base 18: mod_base = OTHER; note = 2'-fluoroadenosine-3'-phosphorothioate
  modified_base 19: mod_base = OTHER; note = 2'-O-methylcytidine-3'-phosphorothioate
  modified_base 20: mod_base = OTHER; note = 2'-O-methylguanosine-3'-phosphorothioate
  modified_base 21: mod_base = OTHER; note = 2'-fluoroadenosine-3'-phosphate
ttctgtgttgtatgtgcacga